United States Patent Application Publication US 2011/0245090 A1 - sequence listing, part 4

SEQ ID NO: 6061 - protein, 314 aa, Homo sapien
MKDSEKHIEVEVRKFLALKQTPDFHTVIGDTVTGLLERCKAEPSFYPRNCLMQLIQTHVLSYSLCPDLMEIALKKKDVQLLQLCLQQFPDIPESVTCACLKIFLSIGDDSLQETDVNMESVFDYSINSVHDEKMEEQTEILQNGFNPEEDKCNNCDQELNKKPQDETKESTSCPVVQKRAALLNAILHSAYSETFLLPHLKDIPAQHITLFLKYLYFLYLKCSENATMTLPGIHPPTLNQIMDWICLLLDANFTVVVMMPEAKRLLINLYKLVKSQISVYSELNKIEVSFRELQKLNQEKNNRGLYSIEVLELF

SEQ ID NO: 6062 - DNA, 971 bp, Homo sapien; identical to SEQ ID NO: 2282

SEQ ID NO: 6063 - protein, 158 aa, Homo sapien; identical to SEQ ID NO: 2283

SEQ ID NO: 6064 - DNA, 6126 bp, Homo sapien
gaattcttaacagtaaagttctgtaattgagacagaattcccaaataaagtcaagagtaaaattcagatagaggagcagttatacatcagtgggaaatttggttggcagaaaaattaccaggtcatacaacttaatgatagacctgaagtcttatttaaaatgattctctaaaattgaagaattggattaagggggccttgtttggctgattttcatactttttcctcttagtctacaggttggctgcatagaagaaaaaggtagagttatttataatcttgtaaatcttggactttgagtcatctattttcttttacagtcatcgaatacttttggaaataaggtaatatatgccttttgagctgtcttgacgttcacagatataaaatattaaatatattttaattttgtgcccttgcagattgatcacttattcattagtaatttaccagagattgtggtggagttattgatgacgttacatgagccagcaaattctagtgccagtcagagcactgacctctgtgacttttcaggggatttggatcctgctcctaatccacctcattttccatcgcatgtgattaaagcaacatttgcctatatcagcaattgtcataaaaccaagttaaaaagcattttagaaattctttccaaaagccctgattcctatcagaaaattcttcttgccatatgtgagcaagcagctgaaacaaataatgtttataagaagcacagaattcttaaaatatatcacctgtttgttagtttattactgaaagatataaaaagtggcttaggaggagcttgggcctttgttcttcgagacgttatttatactttgattcactatatcaaccaaaggccttcttgtatcatggatgtgtcattacgtagcttctccctttgttgtgacttattaagtcaggtttgccagacagccgtgacttactgtaaggatgctctagaaaaccatcttcatgttattgttggtacacttataccccttgtgtatgagcaggtggaggttcagaaacaggtattggacttgttgaaatacttagtgatagataacaaggataatgaaaacctctatatcacgattaagcttttagatccttttcctgaccatgttgtttttaaggatttgcgtattactcagcaaaaaatcaaatacagtagaggacccttttcactcttggaggaaattaaccattttctctcagtaagtgtttatgatgcacttccattgacaagacttgaaggactaaaggatcttcgaagacaactggaactacataaagatcagatggtggacattatgagagcttctcaggataatccgcaagatgggattatggtgaaactagttgtcaatttgttgcagttatccaagatggcaataaaccacactggtgaaaaagaagttctagaggctgttggaagctgcttgggagaagtgggtcctatagatttctctaccatagctatacaacatagtaaagatgcatcttataccaaggcccttaagttatttgaagataaagaacttcagtggaccttcataatgctgacctacctgaataacacactggtagaagattgtgtcaaagttcgatcagcagctgttacctgtttgaaaaacattttagccacaaagactggacatagtttctgggagatttataagatgacaacagatccaatgctggcctatctacagccttttagaacatcaagaaaaaagtttttagaagtacccagatttgacaaagaaaacccttttgaaggcctggatgatataaatctgtggattcctctaagtgaaaatcatgacatttggataaagacactgacttgtgcttttttggacagtggaggcacaaaatgtgaaattcttcaattattaaagccaatgtgtgaagtgaaaactgacttttgtcagactgtacttccatacttgattcatgatattttactccaagatacaaatgaatcatggagaaatctgctttctacacatgttcagggatttttcaccagctgtcttcgacacttctcgcaaacgagccgatccacaacccctgcaaacttggattcagagtcagagcactttttccgatgctgtttggataaaaaatcacaaagaacaatgcttgctgttgtggactacatgagaagacaaaagagaccttcttcaggaacaatttttaatgatgctttctggctggatttaaattatctagaagttgccaaggtagctcagtcttgtgctgctcactttacagctttactctatgcagaaatctatgcagataagaaaagtatggatgatcaagagaaaagaagtcttgcatttgaagaaggaagccagagtacaactatttctagcttgagtgaaaaaagtaaagaagaaactggaataagtttacaggatcttctcttagaaatctacagaagtataggggagccagatagtttgtatggctgtggtggagggaagatgttacaacccattactagactacgaacatatgaacacgaagcaatgtggggcaaagccctagtaacatatgacctcgaaacagcaatcccctcatcaacacgccaggcaggaatcattcaggccttgcagaatttgggactctgccatattctttccgtctatttaaaaggattggattatgaaaataaagactggtgtcctgaactagaagaacttcattaccaagcagcatggaggaatatgcagtgggaccattgcacttccgtcagcaaagaagtagaaggaaccagttaccatgaatcattgtacaatgctctacaatctctaagagacagagaattctctacattttatgaaagtctcaaatatgccagagtaaaagaagtggaagagatgtgtaagcgcagccttgagtctgtgtattcgctctatcccacacttagcaggttgcaggccattggagagctggaaagcattggggagcttttctcaagatcagtcacacatagacaactctctgaagtatatattaagtggcagaaacactcccagcttctcaaggacagtgattttagttttcaggagcctatcatggctctacgcacagtcattttggagatcctgatggaaaaggaaatggacaactcacaaagagaatgtattaaggacattctcaccaaacaccttgtagaactctctatactggccagaactttcaagaacactcagctccctgaaagggcaatatttcaaattaaacagtacaattcagttagctgtggagtctctgagtggcagctggaagaagcacaagtattctgggcaaaaaaggagcagagtcttgccctgagtattctcaagcaaatgatcaagaagttggatgccagctgtgcagcgaacaatcccagcctaaaacttacatacacagaatgtctgagggtttgtggcaactggttagcagaaacgtgcttagaaaatcctgcggtcatcatgcagacctatctagaaaaggcagtagaagttgctggaaattatgatggagaaagtagtgatgagctaagaaatggaaaaatgaaggcatttctctcattagcccggttttcagatactcaataccaaagaattgaaaactacatgaaatcatcggaatttgaaaacaagcaagctctcctgaaaagagccaaagaggaagtaggtctccttagggaacataaaattcagacaaacagatacacagtaaaggttcagcgagagctggagttggatgaattagccctgcgtgcactgaaagaggatcgtaaacgcttcttatgtaaagcagttgaaaattatatcaactgcttattaagtggagaagaacatgatatgtgggtattccgactttgttccctctggcttgaaaattctggagtttctgaagtcaatggcatgatgaagagagacggaatgaagattccaacatataaatttttgcctcttatgtaccaattggctgctagaatggggaccaagatgatgggaggcctaggatttcatgaagtcctcaataatctaatctctagaatttcaatggatcacccccatcacactttgtttattatactggccttagcaaatgcaaacagagatgaatttctgactaaaccagaggtagccagaagaagcagaataactaaaaatgtgcctaaacaaagctctcagcttgatgaggatcgaacagaggctgcaaatagaataatatgtactatcagaagtaggagacctcagatggtcagaagtgttgaggcactttgtgatgcttatattatattagcaaacttagatgccactcagtggaagactcagagaaaaggcataaatattccagcagaccagccaattactaaacttaagaatttagaagatgttgttgtccctactatggaaattaaggtggaccacacaggagaatatggaaatctggtgactatacagtcatttaaagcagaatttcgcttagcaggaggtgtaaatttaccaaaaataatagattgtgtaggttccgatggcaaggagaggagacagcttgttaagggccgtgatgacctgagacaagatgctgtcatgcaacaggtcttccagatgtgtaatacattactgcagagaaacacggaaactaggaagaggaaattaactatctgtacttataaggtggttcccctctctcagcgaagtggtgttcttgaatggtgcacaggaactgtccccattggtgaatttcttgttaacaatgaagatggtgctcataaaagatacaggccaaatgatttcagtgcctttcagtgccaaaagaaaatgatggaggtgcaaaaaaagtcttttgaagagaaatatgaagtcttcatggatgtttgccaaaattttcaaccagttttccgttacttctgcatggaaaaattcttggatccagctatttggtttgagaagcgattggcttatacgcgcagtgtagctacttcttctattgttggttacatacttggacttggtgatagacatgtacagaatatcttgataaatgagcagtcagcagaacttgtacatatagatctaggtgttgcttttgaacagggcaaaatccttcctactcctgagacagttccttttagactcaccagagatattgtggatggcatgggcattacgggtgttgaaggtgtcttcagaagatgctgtgagaaaaccatggaagtgatgagaaactctcaggaaactctgttaaccattgtagaggtccttctatatgatccactctttgactggaccatgaatcctttgaaagctttgtatttacagcagaggccggaagatgaaactgagcttcaccctactctgaatgcagatgaccaagaatgcaaacgaaatctcagtgatattgaccagagtttcaacaaagtagctgaacgtgtcttaatgagactacaagagaaactgaaaggagtggaagaaggcactgtgctcagtgttggtggacaagtgaatttgctcatacagcaggccatagaccccaaaaatctcagccgacttttcccaggatggaaagcttgggtgtgatcttcagtatatgaattaccctttcattcagcctttagaaattatattttagcctttatttttaacctgccaacatactttaagtagggattaatatttaagtgaactattgtgggtttttttgaatgttggttttaatacttgatttaatcaccactcaaaaatgttttgatggtcttaaggaacatctctgctttcactctttagaaataatggtcattcgggctgggcgcagcggctcacgcctgtaatcccagcactttgggaggccgaggtgagcggatcacaaggtcaggagttcgagaccagcctggccaagagaccagcctggccagtatggtgaaaccctgtctctactaaaaatacaaaaattagccgagcatggtggcgggcacctgtaatcccagctactcgagaggctgaggcaggagaatctcttgaacctgggaggtgaaggttgctgtgggccaaaatcatgccattgcactccagcctgggtgacaagagcgaaactccatctcaaaaa

SEQ ID NO: 6065 - protein, 1708 aa, Homo sapien
MTLHEPANSSASQSTDLCDFSGDLDPAPNPPHFPSHVIKATFAYISNCHKTKLKSILEILSKSPDSYQKILLAICEQAAETNNVYKKHRILKIYHLFVSLLLKDIKSGLGGAWAFVLRDVIYTLIHYINQRPSCIMDVSLRSFSLCCDLLSQVCQTAVTYCKDALENHLHVIVGTLIPLVYEQVEVQKQVLDLLKYLVIDNKDNENLYITIKLLDPFPDHVVFKDLRITQQKIKYSRGPFSLLEEINHFLSVSVYDALPLTRLEGLKDLRRQLELHKDQMVDIMRASQDNPQDGIMVKLVVNLLQLSKMAINHTGEKEVLEAVGSCLGEVGPIDFSTIAIQHSKDASYTKALKLFEDKELQWTFIMLTYLNNTLVEDCVKVRSAAVTCLKNILATKTGHSFWEIYKMTTDPMLAYLQPFRTSRKKFLEVPRFDKENPFEGLDDINLWIPLSENHDIWIKTLTCAFLDSGGTKCEILQLLKPMCEVKTDFCQTVLPYLIHDILLQDTNESWRNLLSTHVQGFFTSCLRHFSQTSRSTTPANLDSESEHFFRCCLDKKSQRTMLAVVDYMRRQKRPSSGTIFNDAFWLDLNYLEVAKVAQSCAAHFTALLYAEIYADKKSMDDQEKRSLAFEEGSQSTTISSLSEKSKEETGISLQDLLLEIYRSIGEPDSLYGCGGGKMLQPITRLRTYEHEAMWGKALVTYDLETAIPSSTRQAGIIQALQNLGLCHILSVYLKGLDYENKDWCPELEELHYQAAWRNMQWDHCTSVSKEVEGTSYHESLYNALQSLRDREFSTFYESLKYARVKEVEEMCKRSLESVYSLYPTLSRLQAIGELESIGELFSRSVTHRQLSEVYIKWQKHSQLLKDSDFSFQEPIMALRTVILEILMEKEMDNSQRECIKDILTKHLVELSILARTFKNTQLPERAIFQIKQYNSVSCGVSEWQLEEAQVFWAKKEQSLALSILKQMIKKLDASCAANNPSLKLTYTECLRVCGNWLAETCLENPAVIMQTYLEKAVEVAGNYDGESSDELRNGKMKAFLSLARFSDTQYQRIENYMKSSEFENKQALLKRAKEEVGLLREHKIQTNRYTVKVQRELELDELALRALKEDRKRFLCKAVENYINCLLSGEEHDMWVFRLCSLWLENSGVSEVNGMMKRDGMKIPTYKFLPLMYQLAARMGTKMMGGLGFHEVLNNLISRISMDHPHHTLFIILALANANRDEFLTKPEVARRSRITKNVPKQSSQLDEDRTEAANRIICTIRSRRPQMVRSVEALCDAYIILANLDATQWKTQRKGINIPADQPITKLKNLEDVVVPTMEIKVDHTGEYGNLVTIQSFKAEFRLAGGVNLPKIIDCVGSDGKERRQLVKGRDDLRQDAVMQQVFQMCNTLLQRNTETRKRKLTICTYKVVPLSQRSGVLEWCTGTVPIGEFLVNNEDGAHKRYRPNDFSAFQCQKKMMEVQKKSFEEKYEVFMDVCQNFQPVFRYFCMEKFLDPAIWFEKRLAYTRSVATSSIVGYILGLGDRHVQNILINEQSAELVHIDLGVAFEQGKILPTPETVPFRLTRDIVDGMGITGVEGVFRRCCEKTMEVMRNSQETLLTIVEVLLYDPLFDWTMNPLKALYLQQRPEDETELHPTLNADDQECKRNLSDIDQSFNKVAERVLMRLQEKLKGVEEGTVLSVGGQVNLLIQQAIDPKNLSRLFPGWKAWV

SEQ ID NO: 6066 - DNA, 1700 bp, Homo sapien; identical to SEQ ID NO: 550

SEQ ID NO: 6067 - protein, 361 aa, Homo sapien; identical to SEQ ID NO: 551

SEQ ID NO: 6068 - DNA, 4166 bp, Homo sapien; identical to SEQ ID NO: 1099

SEQ ID NO: 6069 - protein, 1197 aa, Homo sapien; identical to SEQ ID NO: 1100

SEQ ID NO: 6070 - DNA, 1427 bp, Homo sapien
tgggtgttggaggctttaaggtagctttaaattcgtgttgtcctgggagctcgcccttttcggctggagtcgggctttacggcgccggatggctctggacgtgaagtctcgggcaaagcgttatgagaagctggacttccttggggagggacagtttgccaccgtttacaaggccagagataagaataccaaccaaattgtcgccattaagaaaatcaaacttggacatagatcagaagctaaagatggtataaatagaaccgccttaagagagataaaattattacaggagctaagtcatccaaatataattggtctccttgatgcttttggacataaatctaatattagccttgtctttgattttatggaaactgatctagaggttataataaaggataatagtcttgtgctgacaccatcacacatcaaagcctacatgttgatgactcttcaaggattagaatatttacatcaacattggatcctacatagggatctgaaaccaaacaacttgttgctagatgaaaatggagttctaaaactggcagattttggcctggccaaatcttttgggagccccaatagagcttatacacatcaggttgtaaccaggtggtatcgggcccccgagttactatttggagctaggatgtatggtgtaggtgtggacatgtgggctgttggctgtatattagcagagttacttctaagggttccttttttgccaggagattcagaccttgatcagctaacaagaatatttgaaactttgggcacaccaactgaggaacagtggccggacatgtgtagtcttccagattatgtgacatttaagagtttccctggaatacctttgcatcacatcttcagtgcagcaggagacgacttactagatctcatacaaggcttattcttatttaatccatgtgctcgaattacggccacacaggcactgaaaatgaagtatttcagtaatcggccagggccaacacctggatgtcagctgccaagaccaaactgtccagtggaaaccttaaaggagcaatcaaatccagctttggcaataaaaaggaaaagaacagaggccttagaacaaggaggattgcccaagaaactaattttttaaagagaacactggacaacattttactactgagggaaatagccaaaaaggcaaataatggaaaaatagtaaacattaagtaaatgctgtagaagtgagtttgtaaatattctacacatgtaaaatatgtaaaactatgggttatttttattaaatgtattttaaaataaaaatttaattctggtttttctgattagagtcccaaagtgagaaaagttcaatactcttgaaatgtagaattgaaaatgcattagggaaaacttaataaaaattattaccagttatttggaaaaaaaaaaaa

SEQ ID NO: 6071 - protein, 346 aa, Homo sapien
MALDVKSRAKRYEKLDFLGEGQFATVYKARDKNTNQIVAIKKIKLGHRSEAKDGINRTALREIKLLQELSHPNIIGLLDAFGHKSNISLVFDFMETDLEVIIKDNSLVLTPSHIKAYMLMTLQGLEYLHQHWILHRDLKPNNLLLDENGVLKLADFGLAKSFGSPNRAYTHQVVTRWYRAPELLFGARMYGVGVDMWAVGCILAELLLRVPFLPGDSDLDQLTRIFETLGTPTEEQWPDMCSLPDYVTFKSFPGIPLHHIFSAAGDDLLDLIQGLFLFNPCARITATQALKMKYFSNRPGPTPGCQLPRPNCPVETLKEQSNPALAIKRKRTEALEQGGLPKKLIF

SEQ ID NO: 6072 - DNA, 1535 bp, Homo sapien; identical to SEQ ID NO: 463

SEQ ID NO: 6073 - protein, 194 aa, Homo sapien; identical to SEQ ID NO: 464

SEQ ID NO: 6074 - DNA, 1818 bp, Homo sapien
accacaccaagcagcggctgggggggggaaagacgaggaaagaggaggaaaacaaaagctgctacttatggaagatacaaaggagtctaacgtgaagacattttgctccaagaatatcctagccatccttggcttctcctctatcatagctgtgatagctttgcttgctgtggggttgacccagaacaaagcattgccagaaaacgttaagtatgggattgtgctggatgcgggttcttctcacacaagtttatacatctataagtggccagcagaaaaggagaatgacacaggcgtggtgcatcaagtagaagaatgcagggttaaaggtcctggaatctcaaaatttgttcagaaagtaaatgaaataggcatttacctgactgattgcatggaaagagctagggaagtgattccaaggtcccagcaccaagagacacccgtttacctgggagccacggcaggcatgcggttgctcaggatggaaagtgaagagttggcagacagggttctggatgtggtggagaggagcctcagcaactacccctttgacttccagggtgccaggatcattactggccaagaggaaggtgcctatggctggattactatcaactatctgctgggcaaattcagtcagaaaacaaggtggttcagcatagtcccatatgaaaccaataatcaggaaacctttggagctttggaccttgggggagcctctacacaagtcacttttgtaccccaaaaccagactatcgagtccccagataatgctctgcaatttcgcctctatggcaaggactacaatgtctacacacatagcttcttgtgctatgggaaggatcaggcactctggcagaaactggccaaggacattcaggttgcaagtaatgaaattctcagggacccatgctttcatcctggatataagaaggtagtgaacgtaagtgacctttacaagaccccctgcaccaagagatttgagatgactcttccattccagcagtttgaaatccagggtattggaaactatcaacaatgccatcaaagcatcctggagctcttcaacaccagttactgcccttactcccagtgtgccttcaatgggattttcttgccaccactccagggggattttggggcattttcagctttttactttgtgatgaagtttttaaacttgacatcagagaaagtctctcaggaaaaggtgactgagatgatgaaaaagttctgtgctcagccttgggaggagataaaaacatcttacgctggagtaaaggagaagtacctgagtgaatactgcttttctggtacctacattctctccctccttctgcaaggctatcatttcacagctgattcctgggagcacatccatttcattggcaagatccagggcagcgacgccggctggactttgggctacatgctgaacctgaccaacatgatcccagctgagcaaccattgtccacacctctctcccactccacctatgtcttcctcatggttctattctccctggtccttttcacagtggccatcataggcttgcttatctttcacaagccttcatatttctggaaagatatggtatagcaaaagcagctgaaatatgctggctggagtgaggaaaaaatcgtccagggagcattttcctccatcgcagtgttcaaggccatccttccctgtctgccagggccagtcttgacgagtgtgaagcttccttggcttttactgaagcctttcttttggaggtattcaatatcctttgcctcaaggacttcggcagatactgtctctttcatgagtttttc

SEQ ID NO: 6075 - protein, 510 aa, Homo sapien
MEDTKESNVKTFCSKNILAILGFSSIIAVIALLAVGLTQNKALPENVKYGIVLDAGSSHTSLYIYKWPAEKENDTGVVHQVEECRVKGPGISKFVQKVNEIGIYLTDCMERAREVIPRSQHQETPVYLGATAGMRLLRMESEELADRVLDVVERSLSNYPFDFQGARIITGQEEGAYGWITINYLLGKFSQKTRWFSIVPYETNNQETFGALDLGGASTQVTFVPQNQTIESPDNALQFRLYGKDYNVYTHSFLCYGKDQALWQKLAKDIQVASNEILRDPCFHPGYKKVVNVSDLYKTPCTKRFEMTLPFQQFEIQGIGNYQQCHQSILELFNTSYCPYSQCAFNGIFLPPLQGDFGAFSAFYFVMKFLNLTSEKVSQEKVTEMMKKFCAQPWEEIKTSYAGVKEKYLSEYCFSGTYILSLLLQGYHFTADSWEHIHFIGKIQGSDAGWTLGYMLNLTNMIPAEQPLSTPLSHSTYVFLMVLFSLVLFTVAIIGLLIFHKPSYFWKDMV

SEQ ID NO: 6076 - DNA, 2076 bp, Homo sapien
gctggagccggcgcggaggagcgggcggccgcggctgtgccctctcctactcctcaccgcgcgcgcgcggggaaccagtagccgcggctgcttcggttgccgcggtcggtggtcgttatggattctccatgggacgagttggctctggccttctcccgcacgtccatgtttcccttttttgacatcgcgcactatctagtgtcagtgatggcggtgaaacgtcagccgggagcagctgcattggcatggaagaatcctatttcaagctggtttactgctatgctccactgttttggtggaggaattttatcctgtctactgcttgcagagcctccattgaagtttcttgcaaaccacactaacatattactggcatcttcaatctggtatattacatttttttgcccgcatgacctagtttcccagggctattcatatctacctgttcaactactggcttcgggaatgaaggaagtgaccagaacttggaaaatagtaggtggagtcacacatgctaatagctattacaaaaatggctggatagtcatgatagctattggatgggcccgaggtgcaggtggtaccattataacgaattttgagaggttggtaaaaggagattggaaaccagaaggtgatgaatggctgaagatgtcataccctgccaaggtaaccctgctggggtcagttatcttcacattccagcacacccagcatctggcaatatcaaagcataatcttatgttcctttataccatctttattgtggccacaaagataaccatgatgactacacagacttctactatgacatttgctccttttgaggatacattgagttggatgctatttggctggcagcagccgttttcatcatgtgagaagaaaagtgaagcaaagtcaccttccaatggcgttgggtcattggcctcaaagccggtagatgttgcctcagataatgttaaaaagaaacatactaagaagaatgaataaatttacgtgatgagctctacaaggccaaaaattttttttcttatctacctgttatattgtgctaatttttctatgtatgtgatgtgaaatgaagactatatatatggaatggaggtgacagaaagaaagaaattctttgtttgagggagacttcccctttctggattgtatttgtagagtgttacgagtgtatcatgtgattatgctttaccggtataagagattctgttgtgattatttgaatagttttatattaataaaagaagacaaaattttttaaatgttagaaaaagcagatctgtcattgcaaagtaacaaaaattttaagcttttaaaaatgtagatttttcatatttttaaaatttgaatctatttgagctttagttcagcagaattaaatttttacttgacattatcattaaaattgctaggtatggagaacaattcctattttattttgaacactgagaagagtaaacttttcctaaaacactttatattataaatgaaaataaattgctagtttatattttagatataaacatcatattttttattaatacctacatcaaatggaaaatatctgaaattttttttccatagcaggtattttctactagaagtagttttactacttttcatttagaacagagtatgagtcttaatctgaagtctttttcatgcccttgttttaaaaaaactactttttttggcctcaaaaaaatcaagggtgtaatttttaataaattgttaatcctatgttttgtaattttcattttaggagcttgacttatttttttctctctcataaaaacacatttgttttaattgtaggagaaattttctcagcattttgcatgttctttctaatctttgttggtctgaatatattggtagtaattactgtaattattcaacaaaaagcatatccgttcaaaaatttttccactatgtcttttttctagtggctactgttttagttttctagttgaatatctctgacaagctttcgtatggttttgttatatcttcatctacatgtaatgtgttattaattttattaaatgaaaactaatcaccttc

SEQ ID NO: 6077 - protein, 291 aa, Homo sapien; identical to SEQ ID NO: 3767

SEQ ID NO: 6078 - DNA, 1709 bp, Homo sapien
caatttgagtttccatttctcggatttgggaactggtataagcattgtctgtgatgtaaacaaagtcttcaatatttggagaaaacatctcctcatacttgagagcacaagaggaagagagagaccctcactgctggggagtccctgccacactcagtcccccaccacactgaatcggaattccgagagggaagaggaggcgcgagaatggaggtggaggccgtctgtggtggcgcgggcgaggtggaggcccaggactctgaccctgcccctgccttcagcaaggcccccggcagcgccggccactacgaactgccgtgggttgaaaaatataggccagtaaagctgaatgaaattgtcgggaatgaagacaccgtgagcaggctagaggtctttgcaagggaaggaaatgtgcccaacatcatcattgcgggccctccaggaaccggcaagaccacaagcattctgtgcttggcccgggccctgctgggcccagcactcaaagatgccatgttggaactcaatgcttcaaatgacaggggcattgacgttgtgaggaataaaattaaaatgtttgctcaacaaaaagtcactcttcccaaaggccgacataagatcatcattctggatgaagcagacagcatgaccgacggagcccagcaagccttgaggagaaccatggaaatctactctaaaaccactcgcttcgcccttgcttgtaatgcttcggataagatcatcgagcccattcagtcccgctgtgcagtcctccggtacacaaagctgaccgacgcccagatcctcaccaggctgatgaatgttatcgagaaggagagggtaccctacactgatgacggcctagaagccatcatcttcacggcccagggagacatgaggcaggcgctgaacaacctgcagtccaccttctcaggatttggcttcattaacagtgagaacgtgttcaaggtctgtgacgagccccacccactgctggtaaaggagatgatccagcactgtgtgaatgccaacattgacgaagcctacaagattcttgctcacttgtggcatctgggctactcaccagaagatatcattggcaacatctttcgagtgtgtaaaactttccaaatggcagaatacctgaaactggagtttatcaaggaaattggatacactcacatgaaaatagcggaaggagtgaactctcttttgcagatggcaggcctcctggcaaggctgtgtcagaagacaatggccccggtggccagttagagcagagacttcactgactgacttacaggtgccctattctgaggtacaggagccgcggctttctgatgggggaaaatgcgccttaggctgagccaacatgactgtcccccaaactccagtggctggccaggcgcggtagtcacgcctgtaatcccaacactttgggaggccgaggcaggtggatcacctgaggtcagaagttcaagaccagcctggccaacatggggaaaccctgtctttactaaaaatataaaaattagctgggtgtggtggcgggcacctgtaatcccagctactcgggaggctgtggcaggcgaaatcgcttgaacccaggaggaggaggtggaggttgcagtgagccaagatcacaccattgcactccagcctgggcgacagagactccatctggggaaaaaaattaaataaataaactcccg

SEQ ID NO: 6079 - protein, 354 aa, Homo sapien
MEVEAVCGGAGEVEAQDSDPAPAFSKAPGSAGHYELPWVEKYRPVKLNEIVGNEDTVSRLEVFAREGNVPNIIIAGPPGTGKTTSILCLARALLGPALKDAMLELNASNDRGIDVVRNKIKMFAQQKVTLPKGRHKIIILDEADSMTDGAQQALRRTMEIYSKTTRFALACNASDKIIEPIQSRCAVLRYTKLTDAQILTRLMNVIEKERVPYTDDGLEAIIFTAQGDMRQALNNLQSTFSGFGFINSENVFKVCDEPHPLLVKEMIQHCVNANIDEAYKILAHLWHLGYSPEDIIGNIFRVCKTFQMAEYLKLEFIKEIGYTHMKIAEGVNSLLQMAGLLARLCQKTMAPVAS

SEQ ID NO: 6080 - DNA, 1315 bp, Homo sapien; identical to SEQ ID NO: 1075

SEQ ID NO: 6081 - protein, 168 aa, Homo sapien; identical to SEQ ID NO: 1076

SEQ ID NO: 6082 - DNA, 2869 bp, Homo sapien
cacgaagcagggaaagggatctggtaaaacctaaatatgacctggatagaacagatccattagaaaataattatactccagtctcttcggtacctagtatttcatctggccactaccctgtacctactttgagcagcactattacagtaattgctcctactcatcatggaaacaacactaccgaaagttggtctgaatttcatgaagaccaagtggaccataactcttacgtaagaccacccatgccaaagaaacggtgtagagactatgatgaaaagggtttttgtatgagaggagacatgtgtccttttgatcatggaagtgatccagtagttgtagaagatgtgaatcttcctggtatgctgcctttcccagcacagcctcctgttgttgaaggaccacctcctcctggactccccccacctccaccaattcttacacccccacctgtgaatctcaggcccccagtaccaccgccaggtccattgccacccagtctcccacctgttacagatgatatttcttattctttggttttgacaggaccaccacctccacttccagacctatgtatagacacagagtgcatgcacaaaggcccaacttgataggactaacatcaggggatatggatttgccacccagagaaaagcctcccaataaaagcagtatgaggatagtagtggactcagaatcaaggaaaagaaccattggttctggagagcctggagttcctacaaagaagacttggtttgataaaccaaattttaatagaacaaacagcccaggctttcagaagaaggttcaatttggaaatgaaaataccaagcttgaacttagaaaagttcctccagaattaaataatatcagcaaacttaatgaacattttagtcgatttggaaccttggttaacttacaggttgcttataatggtgatcctgaaggtgccctaatccaatttgcaacatacgaagaagcaaagaaagcaatatcaagtacggaagcagtattaaacaatcgctttattaaggtttattggcacagagaaggaagcacccaacagttacaaactacttctccaaagcctttagtccagcagcccattttgcctgttgtgaagcagtcagtcaaagagcggctgggtccagtaccttcaagtactattgaacctgcagaagcccagagtgcctcttcagaccttcctcaggtgttgtctacatctactggcctaacaaaaacagtgtataatccagctgctttgaaggctgcacaggaaaccttacttgtttccacctctgcagttgataataatgaagcacagaaaaaaaaacaggaggcattgaaacttcagcaggatgtaaggaaaaggaaacaagaaattttagaaaagcacattgaaacacagaagatgttaatttcaaaactggagaaaaacaaaacaatgaagtctgaagataaagcagaaataatgaaaactttagaggttttgacaaaaaatattaccaagttgaaagatgaggtcaaagctgcttctcctggacgctgtcttccaaaaagtataaaaaccaagactcagatgcagaaggaattacttgacacagaactggatttatataagaagatgcaggctggagaagaagtcactgaacttaggagaaagtatacagaattacagctggaagctgccaaacgagggattctttcatctggtcggggcagaggaattcattcaagaggtcgaggtgcagttcatggccgaggcagggggcgagggcgagggcgaggtgtgcctggtcatgctgtggtggatcaccgtcccagggcattggagatttctgcatttacggggagcgatagagaagatcttcttcctcattttgcgcaatatggtgaaattgaagattgtcagattgatgattcctcacttcatgcagtaattacattcaagacaagagcagaagctgaagcagctgcagttcatggagctcgtttcaaagggcaagatctaaaactggcatggaataaaccagtaactaatatttcagctgttgaaacagaagaagttgagcctgatgaagaagaatttcaggaagagtctttggtggatgactcattacttcaagatgatgatgaagaagaagaggacaatgaatctcgttcttggagaagatgatttgactgatcattgatctgcatatgctagaactctacctgtgtttcattagtattatctaatgtacttttacatatttgtaaaaacaatttttggtaaaatgtgatgaagatggatttcacaaatagacaaaaaagaagaaaactaccttctgatcttgtattttgaaagattgatgtttgcattttacttcagtaaacaattgctaaagacatcacactagaaacatatgcaatgtttttattacatacttctactggacatcacagaattctttgggttctttgtaatttaatgaataggtctgaaaacttatgaccaatacttgttataacttagaggactttgttttattccaaataaggaatgaatttgcatttaaaatcttaatgaatgttttcaaaactgaatagataacatagtactctaactaaagtctccaagttatgtattataatattacatagtagtatgcttaggctttactatgtattagccttttgttggactgtgtatgtattttaccatatgggttttaatgataatggtgtatgactgctttacatgagtccttatgcatccagatgttataataaagtggaatggtctctttaaaaaaaaaaaaggaaagaaaagagaaaagcaatgacaaaaaaaaaaaaaaaaaaaaaaagccaagacaatgttccttgattt

SEQ ID NO: 6083 - protein, 534 aa, Homo sapien
MYRHRVHAQRPNLIGLTSGDMDLPPREKPPNKSSMRIVVDSESRKRTIGSGEPGVPTKKTWFDKPNFNRTNSPGFQKKVQFGNENTKLELRKVPPELNNISKLNEHFSRFGTLVNLQVAYNGDPEGALIQFATYEEAKKAISSTEAVLNNRFIKVYWHREGSTQQLQTTSPKPLVQQPILPVVKQSVKERLGPVPSSTIEPAEAQSASSDLPQVLSTSTGLTKTVYNPAALKAAQETLLVSTSAVDNNEAQKKKQEALKLQQDVRKRKQEILEKHIETQKMLISKLEKNKTMKSEDKAEIMKTLEVLTKNITKLKDEVKAASPGRCLPKSIKTKTQMQKELLDTELDLYKKMQAGEEVTELRRKYTELQLEAAKRGILSSGRGRGIHSRGRGAVHGRGRGRGRGRGVPGHAVVDHRPRALEISAFTGSDREDLLPHFAQYGEIEDCQIDDSSLHAVITFKTRAEAEAAAVHGARFKGQDLKLAWNKPVTNISAVETEEVEPDEEEFQEESLVDDSLLQDDDEEEEDNESRSWRR

SEQ ID NO: 6084 - DNA, 599 bp, Homo sapien
aggccgcgctcgcgccgaggggctgcgagagtgaccgcggctgctccagcgctgacgccgagccatggcggacgaggagcttgaggcgctgaggagacagaggctggccgagctgcaggccaaacacggggatcctggtgatgcggcccaacaggaagcaaagcacagggaagcagaaatgagaaacagtatcttagcccaagttctggatcagtcggcccgggccaggttaagtaacttagcacttgtaaagcctgaaaaaactaaagcagtagagaattaccttatacagatggcaagatatggacaactaagtgagaaggtatcagaacaaggtttaatagaaatccttaaaaaagtaagccaacaaacagaaaagacaacaacagtgaaattcaacagaagaaaagtaatggactctgatgaagatgacgattattgaactacaagtgctcacagactagaacttaacggaacaagtctaggacagaagttaagatctgattatttactttgtttattgtctatatgccttttaaaaaaataaacttgttatgcaaaataaaaaaaaaaaaaaaaaaaaaaaaaaaaaaaaaaaa

SEQ ID NO: 6085 - protein, 125 aa, Homo sapien
MADEELEALRRQRLAELQAKHGDPGDAAQQEAKHREAEMRNSILAQVLDQSARARLSNLALVKPEKTKAVENYLIQMARYGQLSEKVSEQGLIEILKKVSQQTEKTTTVKFNRRKVMDSDEDDDY

SEQ ID NO: 6086 - DNA, 1611 bp, Homo sapien
acataatttctggagccctgtaccaacgtgtggccacatattctgtcaggaaccctgtgtgatcatggtctggatctgcaacacgggccaggccaaagtcacagatcttgagatcacaggtggtgttgagcagcaggcaggcaggcaatcggtccgagtggctgtcggctcttcagctctccgctcggcgtcttccttcctctcccggtcagcgtcggcggctgcaccggcggcgggcagtcctgcgggaggggcgacaagagctgaggcgcggccgccgagcgtcgagctcagcgcggcggaggcggcggcggcccggcagccaacatggcggcggcggcggcggcgggcgcgggcccggagatggtccgcgggcaggtgttcgacgtggggccgcgctacaccaacctctcgtacatcggcgagggcgcctacggcatggtgtgctctgcttatgataatgtcaacaaagttcgagtagctatcaagaaaatcagcccctttgagcaccagacctactgccagagaaccctgagggagataaaaatcttactgcgcttcagacatgagaacatcattggaatcaatgacattattcgagcaccaaccatcgagcaaatgaaagatgtatatatagtacaggacctcatggaaacagatctttacaagctcttgaagacacaacacctcagcaatgaccatatctgctattttctctaccagatcctcagagggttaaaatatatccattcagctaacgttctgcaccgtgacctcaagccttccaacctgctgctcaacaccacctgtgatctcaagatctgtgactttggcctggcccgtgttgcagatccagaccatgatcacacagggttcctgacagaatatgtggccacacgttggtacagggctccagaaattatgttgaattccaagggctacaccaagtccattgatatttggtctgtaggctgcattctggcagaaatgctttccaacaggcccatctttccagggaagcattatcttgaccagctgaatcacattttgggtattcttggatccccatcacaagaagacctgaattgtataataaatttaaaagctaggaactatttgctttctcttccacacaaaaataaggtgccatggaacaggctgttcccaaatgctgactccaaagctctggacttattggacaaaatgttgacattcaacccacacaagaggattgaagtagaacaggctctggcccacccatatctggagcagtattacgacccgagtgacgagcccatcgccgaagcaccattcaagttcgacatggaattggatgacttgcctaaggaaaagctaaaagaactaatttttgaagagactgctagattccagccaggatacagatcttaaatttgtcaggacaagggctcagaggactggacgtgctcagacatcggtgttcttcttcccagttcttgacccctggtcctgtctccagcccgtcttggcttatccactttgactcctttgagccgtttggaggggcggtttctggtagttgtggcttttatgctttcaaagaatttcttcagtccagagaattcactggcc

SEQ ID NO: 6087 - protein, 360 aa, Homo sapien [sequence omitted]

SEQ ID NO: 6088 - DNA, 1940 bp, Homo sapien; identical to SEQ ID NO: 1765

SEQ ID NO: 6089 - protein, 516 aa, Homo sapien; identical to SEQ ID NO: 1766

SEQ ID NO: 6090 - DNA, 3568 bp, Homo sapien; identical to SEQ ID NO: 471

SEQ ID NO: 6091 - protein, 599 aa, Homo sapien; identical to SEQ ID NO: 472

SEQ ID NO: 6092 - DNA, 3169 bp, Homo sapien
ccgcggacctgtcagagatacagaggttgtgggggcgggagacagaaagagagagagatccagagaccgagtcttacgttgacacgcagagagaaagacgcagagacagacaaacaaacagataggagaggctctccaggaggccggggggcccactccgcctatcgctcccctcggctacgctgccacttcaatgccccgcaggtcgcgagctgctgttctttcgaaggcgtcggagaaccaggggcgtcccgcgccacctctgactcggagcagcgccgagcactgacgctcccgcccttgggcaaggacgccagtgcgcccgcgcgcgtccctctgcgcggcagcccgtcgcgggccctcaaggggaagcccaggccaggatggccccgggtcgcgcggtggccgggctcctgttgctggcggccgccggcctcggaggagtggcggaggggccagggctagccttcagcgaggatgtgctgagcgtgttcggcgcgaatctgagcctgtcggcggcgcagctccagcacttgctggagcagatgggagccgcctcccgcgtgggcgtcccggagcctggccagctgcacttcaaccagtgtttaactgctgaagagatcttttcccttcatggcttttcaaatgctacccaaataaccagctccaaattctctgtcatctgtccagcagtcttacagcaattgaactttcacccatgtgaggatcggcccaagcacaaaacaagaccaagtcattcagaagtttggggatatggattcctgtcagtgacgattattaatctggcatctctcctcggattgattttgactccactgataaagaaatcttatttcccaaagattttgaccttttttgtggggctggctattgggactcttttttcaaatgcaattttccaacttattccagaggcatttggatttgatcccaaagtcgacagttatgttgagaaggcagttgctgtgtttggtggattttacctacttttcttttttgaaagaatgctaaagatgttattaaagacatatggtcagaatggtcatacccactttggaaatgataactttggtcctcaagaaaaaactcatcaacctaaagcattacctgccatcaatggtgtgacatgctatgcaaatcctgctgtcacagaagctaatggacatatccattttgataatgtcagtgtggtatctctacaggatggaaaaaaagagccaagttcatgtacctgtttgaaggggcccaaactgtcagaaatagggacgattgcctggatgataacgctctgcgatgccctccacaatttcatcgatggcctggcgattggggcttcctgcaccttgtctctccttcagggactcagtacttccatagcaatcctatgtgaggagtttccccacgagttaggagactttgtgatcctactcaatgcagggatgagcactcgacaagccttgctattcaacttcctttctgcatgttcctgctatgttgggctagcttttggcattttggtgggcaacaatttcgctccaaatattatatttgcacttgctggaggcatgttcctctatatttctctggcagatatgtttccagagatgaatgatatgctgagagaaaaggtaactggaagaaaaaccgatttcaccttcttcatgattcagaatgctggaatgttaactggattcacagccattctactcattaccttgtatgcaggagaaatcgaattggagtaatagaaaatggaagatggtgttgttaataaaggcatttaatagataaaaacatctccaaaaaggattttgaagctgatcctatttagttaaaaagataattttgctttcaaccgtaggtccagaaaactaattattggcatcagtctgtgaaatagtccattatttgttgttaaaaatgcttcaaaaggttttcagtgtcagtctgagatgcctggtatataggagcctttgggaaatacctatttttcagtattccatgcatattggatatcaccatgaagcaagagacatgcattctataatcatgtagacactcagactcaggggaaaatacaagttatatcctgaaagcctttaaaactctatggtaggatcaaagattcaaatggtttcagagaggttttatttcaattaatttgttctagtgctttcaagagcaagtacatcaaaatgtagaaggtaaaatgtatgcaacactaatataaattattccaagtctttaaggagccaaagaaaaaaaagatttctcacagctttttgttctgttttgtatttcaattaggaacttgcagtattattttgaaaaccattctaaaataataggagttaggaaataaataaagttttgctagccctgctaagttcaggcttagaggcttatcgctaagtgtaaacttcaccagattccacgaaaagctggatagctttttttctgacttatgttgtggttgcacccctcacaaatggcagaacagtatgtaaagctggtaacacctcggtttcagtgcaccatgtgtttgctttgtgaaggtgaagaatatgttggtttagagaaagaaattggatgtaattttatgcaatttacttttaaagacaaacataactatttagcagagaatattttaataaatgcaaaacaacagctggactgctgtacatcaaggacagattaactggaaaacatatgttccttatgtgtgattgagagccattcagaaaagacttcctttgtgttcagcctatacttttccatatggtataccttgaaaaaaattagcacaccatggttatttttctaccttttataaaagacagagcctgtttactcatttagaagatagagaaaattggtctaaaattgaacatcctagattcacactcccaagtcacttaaggtgatttgatggtgaggaaaatgattgacaaagcccaacaatgatctcaggaattacattttccaacagaccaaaaaatgttttcatgtagcagcaatgcagatttggtgaatatttaatatatattttagtatgtatttcactttatgactgacaattaaaaaatattgtttggccaaatagtaaacacccttttgaaaccaaaaaaaaaaaaaaaaaaaaaaaaaa

SEQ ID NO: 6093 - protein, 460 aa, Homo sapien; identical to SEQ ID NO: 1973

SEQ ID NO: 6094 - DNA, 3874 bp, Homo sapien; identical to SEQ ID NO: 877

SEQ ID NO: 6095 - protein, 633 aa, Homo sapien; identical to SEQ ID NO: 878

SEQ ID NO: 6096 - DNA, 1505 bp, Homo sapien; identical to SEQ ID NO: 1129

SEQ ID NO: 6097 - protein, 313 aa, Homo sapien; identical to SEQ ID NO: 1130

SEQ ID NO: 6098 - DNA, 1654 bp, Homo sapien
atcaaacactgttatgcacataatgcagcactgtgatctaatttaaataatacttttttattatttatactactatatataatatacatcaacacttttgctatataacctaagtgataaccctcttttagttacctgccaaactctggacttggtttatattgcagttaacacagttacaaagctgtaatggtgtctttttttcctttgtaacggaatgtgtaaatcaaagtatatacattgtgtggtgttcctgtttctggagtttcatgaggatttacacatggcattcagtgttctgtatagatctgcctacctttgtgaattcatctgttaacccctcttcctttgagagagcaccggcgatggtggttaactccttgtgttttctctctctcctactggttattcttgaattaagcacagactcgtcagctcggttgctttatcatgaataatgtgtgtgaccttgcagttcttccacagttcagcaaacaagtgctagcttcactgaccaaaaattaaggaaggaaaacacagtttttaaaacgatccatcttttaacagccgaaaccgatgtgtctatggtgctgcaccttgctgttgtacttctgaaatcagacgtgtgtgaacgatcatttctgacttaaccgtgagatgctcacgagtacccttcctgttgttttgttagcattgaaatcgagactatttatttggaatatatacaacagtgtttttccactgtatttcatttgcaaaagttgagaactgctttctctaccttttgcaaaataattgatattccatattggattctcaaagacttcgatatggtgaacctattaaacctagaaattgtattcatcctttcatgactgtggcctgagttccccagcccctctcctccttttttttagatgagatttagcacactctcagttatttaaacatgcaacatttcttgagtatgtatgttgaggccatctgagctcatagctgattcagtaaccagtttcatgctgtgtcattcacactcactacttaatactgccatggtgaaaatgtggaggaaaaatgtatccatgtgtgtctgggaagcatatacacttgtacattttttaatactctgattctgtaacatttctgagttttgttttgttttacagaaaaaaaaaaaaaagtgataaagcaatcagaagaccaagaggtttactattgatgcttagggtcgtctgaccttggctggccaatagacctacacggccaaattaatttacgagagtaataatttttcaaaagccaattttttttctgtattttctgtatgaaactgccaatatcatgaatagaaagggagaaccataaaggagaaagaacgtgatgttctgttatgttcatgtaaacctaaagaaacagtgtggaggcaggcgcgatcagccgaactctagggacttggtgttgcttggaaggcatccatacctgcattttgcattcttcgtatgtaatcatattgccaaagacaaactatttcatcatttattgtaaataacacttttccccagacctaccataaagtttctgtgatgtattgtcttccagttgcaataaaaattactgagttgcatcaaaaaaaaaaaaaaaaaaaaaaaaaaaa

SEQ ID NO: 6099 - protein, 62 aa, Homo sapien
MRIYTWHSVFCIDLPTFVNSSVNPSSFERAPAMVVNSLCFLSLLLVILELSTDSSARLLYHE

SEQ ID NO: 6100 - DNA, 1537 bp, Homo sapien; identical to SEQ ID NO: 4853

SEQ ID NO: 6101 - protein, 337 aa, Homo sapien; identical to SEQ ID NO: 4854

SEQ ID NO: 6102 - DNA, 2147 bp, Homo sapien; identical to SEQ ID NO: 3108

SEQ ID NO: 6103 - protein, 519 aa, Homo sapien; identical to SEQ ID NO: 3109

SEQ ID NO: 6104 - DNA, 2912 bp, Homo sapien; identical to SEQ ID NO: 3315

SEQ ID NO: 6105 - protein, 630 aa, Homo sapien; identical to SEQ ID NO: 3316

SEQ ID NO: 6106 - DNA, 6036 bp, Homo sapien; identical to SEQ ID NO: 3327

SEQ ID NO: 6107 - protein, 1712 aa, Homo sapien
MERNVLTTFSQEMSQLILNEMPKAEYSSLFNDFVESEFFLIDGDSLLITCICEISFKPGQNLHFFYLVERYLVDLISKGGQFTIVFFKDAEYAYFNFPELLSLRTALILHLQKNTTIDVRTTFSRCLSKEWGSFLEESYPYFLIVADEGLNDLQTQLFNFLIIHSWARKVNVVLSSGQESDVLCLYAYLLPSMYRHQIFSWKNKQNIKDAYTTLLNQLERFKLSALAPLFGSLKWNNITEEAHKTVSLLTQVWPEGSDIRRVFCVTSCSLSLRMYHRFLGNREPSSGQETEIQQVNSNCLTLQEMEDLCKLHCLTVVFLLHLPLSQRACARVITSHWAEDMKPLLQMKKWCEYFILRNIHTFEFWNLNLIHLSDLNDELLLKNIAFYYENENVKGLHLNLGDTIMKDYEYLWNTVSKLVRDFEVGQPFPLRTTKVCFLGKKPSPIKDSSNEMVPNLGFIPTSSFVVDKFAGDILKDLPFLKSDDPIVTSLVKQKEFDELVHWHSHKPLSDDYDRSRCQFDEKSRDPRVLRSVQKYHVFQRFYGNSLETVSSKIIVTQTIKSKKDFSGPKSKKAHETKAEIIARENKKRLFAREEQKEEQKWNALSFSIEEQLKENLHSGIKSLEDFLKSCKSSCVKLQVEMVGLTACLKAWKEHCRSEEGKTTKDLSIAVQVMKRIHSLMEKYSELLQEDDRQLIARCLKYLGFDELASSLHPAQDAENDVKVKKRNKYSIGIGPARFQLQYMGHYLIRDERKDPDPRVQDFIPDTWQRELLDVVDKNESAVIVAPTSSGKTYASYYCMEKVLKESDDGVVVYVAPTKALVNQVAATVQNRFTKNLPSGEVLCGVFTREYRHDALNCQVLITVPACFEILLLAPHRQNWVKKIRYVIFDEVHCLGGEIGAEIWEHLLVMIRCPFLALSATISNPEHLTEWLQSVKWYWKQEDKIIENNTASKRHVGRQAGFPKDYLQVKQSYKVRLVLYGERYNDLEKHVCSIKHGDIHFDHFHPCAALTTDHIERYGFPPDLTLSPRESIQLYDAMFQIWKSWPRAQELCPENFIHFNNKLVIKKMDARKYEESLKAELTSWIKNGNVEQARMVLQNLSPEADLSPENMITMFPLLVEKLRKMEKLPALFFLFKLGAVENAAESVSTFLKKKQETKRPPKADKEAHVMANKLRKVKKSIEKQKIIDEKSQKKTRNVDQSLIHEAEHDNLVKCLEKNLEIPQDCTYADQKAVDTETLQKVFGRVKFERKGEELKALAERGIGYHHSAMSFKEKQLVEILFRKGYLRVVTATGTLALGVNMPCKSVVFAQNSVYLDALNYRQMSGRAGRRGQDLMGDVYFFDIPFPKIGKLIKSNVPELRGHFPLSITLVLRLMLLASKGDDPEDTKAKVLSVLKHSLLSFKQPRVMDMLKLYFLFSLQFLVKEGYLDQEGNPMGFAGLVSHLHYHEPSNLVFVSFLVNGLFHDLCQPTRKGSKHFSQDVMEKLVLVLAHLFGRRYFPPKFQDAHFEFYQSKVFLDDLPEDFSDALDEYNMKIMEDFTTFLRIVSKLADMNQEYQLPLSKIKFTGKECEDSQLVSHLMSCKEGRVAISPFVCLSGNFDDDLLRLETPNHVTLGTIGVNRSQAPVLLSQKFDNRGRKMSLNAYALDFYKHGSLIGLVQDNRMNEGDAYYLLKDFALTIKSISVSLRELCENEDDNVVLAFEQLSTTFWEKLNKV

SEQ ID NO: 6108 - DNA, 3502 bp, Homo sapien
gcgcgcagctggttcccgctctgcagcgcaacgcctgaggcagtgggcgcgctcagtcccgggaccaggcgttctctcctctcgcctctgggcctgggacccgcaaagcggcgatggagcggaggtcgcggaggaagtcgcggcgcaacgggcgctcgaccgcgggcaaggccgccgcgacccagcccgcgaagtctccgggcgcacagctctggctctttcccagcgccgcgggcctccaccgcgcgctgctccggagggtggaggtgacgcgccaactctgctgctcgccggggcgcctcgcggtcttggaacgcggcggggcgggcgtccaggttcaccagctgctcgccgggagcggcggcgcccggacgccgaaatgcattaaattaggaaaaaacatgaagatacattccgtggaccaaggagcagagcacatgctgattctctcatcagatggaaaaccatttgagtatgacaactatagcatgaaacatctaaggtttgaaagcattttacaagaaaaaaaaataattcagatcacatgtggagattaccattctcttgcactctcaaaaggcggtgagctttttgcctggggacagaacctgcatgggcagcttggagttggaaggaaatttccctcaaccaccacaccacagattgtggagcacctcgcaggagtacccttggctcagatttctgccggagaagcccacagcatggccttatccatgtctggcaacatttattcatggggaaaaaatgaatgtggacaactaggcctgggccacactgagagtaaagatgatccatcccttattgaaggactagacaatcagaaagttgaatttgtcgcttgtggtggctctcacagtgccctactcacacaggatgggctgctgtttactttcggtgctggaaaacatgggcaacttggtcataattcaacacagaatgagctaagaccctgtttggtggctgagcttgttgggtatagagtgactcagatagcatgtggaaggtggcacacacttgcctatgtttctgatttgggaaaggtcttttcctttggttctggaaaagatggacaactgggaaatggtggaacacgtgaccagctgatgccgcttccagtgaaagtatcatcaagtgaagaactcaaacttgaaagccatacctcagaaaaggagttaataatgattgctggagggaatcaaagcattttgctctggataaagaaagagaattcatatgttaatctgaagaggacaattcctactctgaatgaagggactgtaaagagatggattgctgatgtggagactaaacggtggcagagcacaaaaagggaaatccaagagatattttcatctcctgcttgtctaactggaagttttttaaggaaaagaagaactacagaaatgatgcctgtttatttggacttaaataaagcaagaaacatcttcagggagttaacccaaaaggactggattactaacatgataaccacctgcctcaaagataatctgctcaaaagacttccatttcattctccaccccaagaagctttagaaattttcttccttctcccagaatgtcctgtgatgcatatttccaacaactgggagagccttgtggttccatttgcaaaggttgtttgtaaaatgagtgaccagtcttcactggttctggaagagtattgggcaactctgcaagaatccactttcagcaaactggtccagatgtttaaaacagccgtcatatgccagttggattactgggatgaaagtgctgaggagaatggtaatgttcaagctctcctagaaatgttgaagaagctgcacagggtaaaccaggtgaaatgtcaactacctgaaagtattttccaagtagacgaactcttgcaccgtctcaatttttttgtagaagtatgcagaaggtacttgtggaaaatgactgtggacgcttcagaaaatgtacaatgctgcgtcatattcagtcactttccatttatctttaataatctgtcgaaaattaaactactacatacagacacacttttaaaaatagagagtaaaaaacataaagcttatcttaggtcggcagcaattgaggaagaaagagagtctgaattcgctttgaggcccacgtttgatctaacagtcagaaggaatcacttgattgaggatgttttgaatcagctaagtcaatttgagaatgaagacctgaggaaagagttatgggtttcatttagtggagaaattgggtatgacctcggaggagtcaagaaagagttcttctactgtctgtttgcagagatgatccagccggaatatgggatgttcatgtatcctgaaggggcttcctgcatgtggtttcctgtcaagcctaaatttgagaagaaaagatacttcttttttggggttctatgtggactttccctgttcaattgcaatgttgccaacctccctttcccactggcactgtttaagaaacttttggaccaaatgccatcattggaagacttgaaagaactcagtcctgatttgggaaagaatttgcaaacacttctggatgatgaaggtgataactttgaggaagtattttacatccattttaatgtgcactgggacagaaacgacacaaacttaattcctaatggaagtagcataactgtcaaccagactaacaagagagactatgtttctaagtatatcaattacattttcaacgactctgtaaaggcggtttatgaagaatttcggagaggattttataaaatgtgcgacgaagacattatcaaattattccaccccgaagaactgaaggatgtgattgttggaaatacagattatgattggaaaacatttgaaaagaatgcacgttatgaaccaggatataacagttcacatcccaccatagtgatgttttggaaggctttccacaaattgactctggaagaaaagaaaaaattccttgtatttcttacaggaactgacagactacaaatgaaagatttaaataatatgaaaataacattttgctgtcctgaaagttggaatgaaagagaccctataagagcactgacatgtttcagtgtcctcttcctccctaaatattctacaatggaaacagttgaagaagcgcttcaagaagccatcaacaacaacagaggatttggctgaccagcttgcttgtccaacagccttattttgttgttgttatcgttgttgttgttgttgttgttgttgtttctctactttgttttgttttaggcttttagcagcctgaagccatggtttttcatttctgtctctagtgataagcaggaaagagggatgaagaagagggtttactggccggttagaacccgtgactgtattctctcccttggatacccctatgcctacatcatattccttacctcttttgggaaatatttttcaaaaataaaataaccgaaaaactaaaaaaagaaaaaaaaaaaaaaaaaaaaaaa

SEQ ID NO: 6109 - protein, 1024 aa, Homo sapien
MERRSRRKSRRNGRSTAGKAAATQPAKSPGAQLWLFPSAAGLHRALLRRVEVTRQLCCSPGRLAVLERGGAGVQVHQLLAGSGGARTPKCIKLGKNMKIHSVDQGAEHMLILSSDGKPFEYDNYSMKHLRFESILQEKKIIQITCGDYHSLALSKGGELFAWGQNLHGQLGVGRKFPSTTTPQIVEHLAGVPLAQISAGEAHSMALSMSGNIYSWGKNECGQLGLGHTESKDDPSLIEGLDNQKVEFVACGGSHSALLTQDGLLFTFGAGKHGQLGHNSTQNELRPCLVAELVGYRVTQIACGRWHTLAYVSDLGKVFSFGSGKDGQLGNGGTRDQLMPLPVKVSSSEELKLESHTSEKELIMIAGGNQSILLWIKKENSYVNLKRTIPTLNEGTVKRWIADVETKRWQSTKREIQEIFSSPACLTGSFLRKRRTTEMMPVYLDLNKARNIFRELTQKDWITNMITTCLKDNLLKRLPFHSPPQEALEIFFLLPECPVMHISNNWESLVVPFAKVVCKMSDQSSLVLEEYWATLQESTFSKLVQMFKTAVICQLDYWDESAEENGNVQALLEMLKKLHRVNQVKCQLPESIFQVDELLHRLNFFVEVCRRYLWKMTVDASENVQCCVIFSHFPFIFNNLSKIKLLHTDTLLKIESKKHKAYLRSAAIEEERESEFALRPTFDLTVRRNHLIEDVLNQLSQFENEDLRKELWVSFSGEIGYDLGGVKKEFFYCLFAEMIQPEYGMFMYPEGASCMWFPVKPKFEKKRYFFFGVLCGLSLFNCNVANLPFPLALFKKLLDQMPSLEDLKELSPDLGKNLQTLLDDEGDNFEEVFYIHFNVHWDRNDTNLIPNGSSITVNQTNKRDYVSKYINYIFNDSVKAVYEEFRRGFYKMCDEDIIKLFHPEELKDVIVGNTDYDWKTFEKNARYEPGYNSSHPTIVMFWKAFHKLTLEEKKKFLVFLTGTDRLQMKDLNNMKITFCCPESWNERDPIRALTCFSVLFLPKYSTMETVEEALQEAINNNRGFG

SEQ ID NO: 6110 - DNA, 2770 bp, Homo sapien; identical to SEQ ID NO: 3381

SEQ ID NO: 6111 - protein, 239 aa, Homo sapien; identical to SEQ ID NO: 3382

SEQ ID NO: 6112 - DNA, 4221 bp, Homo sapien
cagcggcagtggagttcgctgcgcgctgttgggggccacctgtcttttcgcttgtgtccctctttctagtgtcgcgctcgagtcccgacgggccgctccaagcctcgacatgtcgtacaactacgtggtaacggcccagaagcccaccgccgtgaacggctgcgtgaccggacactttacttcggccgaagacttaaacctgttgattgccaaaaacacgagattagagatctatgtggtcaccgccgaggggcttcggcccgtcaaagaggtgggcatgtatgggaagattgcggtcatggagcttttcaggcccaagggggagagcaaggacctgctgtttatcttgacagcgaagtacaatgcctgcatcctggagtataaacagagtggcgagagcattgacatcattacgcgagcccatggcaatgtccaggaccgcattggccgcccctcagagaccggcattattggcatcattgaccctgagtgccggatgattggcctgcgtctctatgatggccttttcaaggttattccactagatcgcgataataaagaactcaaggccttcaacatccgcctggaggagctgcatgtcattgatgtcaagttcctatatggttgccaagcacctactatttgctttgtctaccaggaccctcaggggcggcacgtaaaaacctatgaggtgtctctccgagaaaaggaattcaataagggcccttggaaacaggaaaatgtcgaagctgaagcttccatggtgatcgcagtcccagagccctttgggggggccatcatcattggacaggagtcaatcacctatcacaatggtgacaaatacctggctattgcccctcctatcatcaagcaaagcacgattgtgtgccacaatcgagtggaccctaatggctcaagatacctgctgggagacatggaaggccggctcttcatgctgcttttggagaaggaggaacagatggatggcaccgtcactctcaaggatctccgtgtagaactccttggagagacctctattgctgagtgcttgacataccttgataatggtgttgtgtttgtcgggtctcgcctgggtgactcccagcttgtgaagctcaacgttgacagtaatgaacaaggctcctatgtagtggccatggaaacctttaccaacttaggacccattgtcgatatgtgcgtggtggacctggagaggcaggggcaggggcagctggtcacttgctctggggctttcaaggaaggttctttgcggatcatccggaatggaattggaatccacgagcatgccagcattgacttaccaggcatcaaaggattatggccactgcggtctgaccctaatcgtgagacttatgacactttggtgctctcttttgtgggccagacaagagttctcatgttaaatggagaggaggtagaagaaaccgaactgatgggtttcgtggatgatcagcagactttcttctgtggcaacgtggctcatcagcagcttatccagatcacttcagcatcggtgaggttggtctctcaagaacccaaagctctggtcagtgaatggaaggagcctcaggccaagaacatcagtgtggcctcctgcaatagcagccaggtggtggtggctgtaggcagggccctctactatctgcagatccatcctcaggagctccggcagatcagccacacagagatggaacatgaagtggcttgcttggacatcaccccattaggagacagcaatggactgtcccctctttgtgccattggcctctggacggacatctcggctcgtatcttgaagttgccctcttttgaactactgcacaaggagatgctgggtggagagatcattcctcgctccatcctgatgaccacctttgagagtagccattacctcctttgtgccttgggagatggagcgcttttctactttgggctcaacattgagacaggtctgttgagcgaccgtaagaaggtgactttgggcacccagcccaccgtattgaggacttttcgttctctttctaccaccaacgtctttgcttgttctgaccgccccactgtcatctatagcagcaaccacaaattggtcttctcaaatgtcaacctcaaggaagtgaactacatgtgtcccctcaattcagatggctatcctgacagcctggcgctggccaacaatagcaccctcaccattggcaccatcgatgagatccagaagctgcacattcgcacagttcccctctatgagtctccaaggaagatctgctaccaggaagtgtcccagtgtttcggggtcctctccagccgcattgaagtccaagacacgagtgggggcacgacagccttgaggcccagcgctagcacccaggctctgtccagcagtgtaagctccagcaagctgttctccagcagcactgctcctcatgagacctcctttggagaagaggtggaggtgcataacctacttatcattgaccaacacacctttgaagtgcttcatgcccaccagtttctgcagaatgaatatgccctcagtctggtttcctgcaagctgggcaaagaccccaacacttacttcattgtgggcacagcaatggtgtatcctgaagaggcagagcccaagcagggtcgcattgtggtctttcagtattcggatggaaaactacagactgtggctgaaaaggaagtgaaaggggccgtgtactctatggtggaatttaacgggaagctgttagccagcatcaatagcacggtgcggctctatgagtggacaacagagaaggacgtgcgcactgagtgcaaccactacaacaacatcatggccctctacctgaagaccaagggcgacttcatcctggtgggcgaccttatgcgctcagtgctgctgcttgcctacaagcccatggaaggaaactttgaagagattgctcgagactttaatcccaactggatgagtgctgtggaaatcttggatgatgacaattttctgggggctgaaaatgcctttaacttgtttgtgtgtcaaaaggatagcgctgccaccactgacgaggagcggcagcacctccaggaggttggtcttttccacctgggcgagtttgtcaatgtcttttgccacggctctctggtaatgcagaatctgggtgagacttccacccccacacaaggctcggtgctcttcggcacggtcaacggcatgatagggctggtgacctcactgtcagagagctggtacaacctcctgctggacatgcagaatcgactcaataaagtcatcaaaagtgtggggaagatcgagcactccttctggagatcctttcacaccgagcggaagacagaaccagccacaggtttcatcgacggtgacttgattgagagtttcctggatattagccgccccaagatgcaggaggtggtggcaaacctacagtatgacgatggcagcggtatgaagcgagaggccactgcagacgacctcatcaaggttgtggaggagctaactcggatccattagccaagggcagggggcccctttgctgaccctccccaaaggctttgccctgctgccctccccctcctctccaccatcgtcttcttggccatgggaggcctttccctaagccagctgcccccagagccacagttcccctatgtggaagtggggcgggcttcatagagacttgggaatgagctgaaggtgaaacattttctccctggatttttaccagtctcacatgattccagccatcaccttagaccaccaagccttgattggtgttgccagttgtcctccttccggggaaggattttgcagttctttggctgaaaggaagctgtgcgtgtgtgtgtgtgtatgtgtgtgtgtgtatgtgtatctcacactcatgcattgtcctctttttatttagattggcagtgtagggagttgtgggtagtggggaagagggttaggagggtttcattgtctgtgaagtgagaccttccttttacttttcttctattgcctctgagagcatcaggcctagaggcctgactgccaagccatgggtagcctgggtgtaaaacctggagatggtggatgatccccacgccacagcccttttgtctctgcaaactgccttcttcggaaagaagaaggtgggaggatgtgaattgttagtttctgagttttaccaaataaagtagaatataagaagaaaaaaa

SEQ ID NO: 6113 - protein, 1140 aa, Homo sapien
MSYNYVVTAQKPTAVNGCVTGHFTSAEDLNLLIAKNTRLEIYVVTAEGLRPVKEVGMYGKIAVMELFRPKGESKDLLFILTAKYNACILEYKQSGESIDIITRAHGNVQDRIGRPSETGIIGIIDPECRMIGLRLYDGLFKVIPLDRDNKELKAFNIRLEELHVIDVKFLYGCQAPTICFVYQDPQGRHVKTYEVSLREKEFNKGPWKQENVEAEASMVIAVPEPFGGAIIIGQESITYHNGDKYLAIAPPIIKQSTIVCHNRVDPNGSRYLLGDMEGRLFMLLLEKEEQMDGTVTLKDLRVELLGETSIAECLTYLDNGVVFVGSRLGDSQLVKLNVDSNEQGSYVVAMETFTNLGPIVDMCVVDLERQGQGQLVTCSGAFKEGSLRIIRNGIGIHEHASIDLPGIKGLWPLRSDPNRETYDTLVLSFVGQTRVLMLNGEEVEETELMGFVDDQQTFFCGNVAHQQLIQITSASVRLVSQEPKALVSEWKEPQAKNISVASCNSSQVVVAVGRALYYLQIHPQELRQISHTEMEHEVACLDITPLGDSNGLSPLCAIGLWTDISARILKLPSFELLHKEMLGGEIIPRSILMTTFESSHYLLCALGDGALFYFGLNIETGLLSDRKKVTLGTQPTVLRTFRSLSTTNVFACSDRPTVIYSSNHKLVFSNVNLKEVNYMCPLNSDGYPDSLALANNSTLTIGTIDEIQKLHIRTVPLYESPRKICYQEVSQCFGVLSSRIEVQDTSGGTTALRPSASTQALSSSVSSSKLFSSSTAPHETSFGEEVEVHNLLIIDQHTFEVLHAHQFLQNEYALSLVSCKLGKDPNTYFIVGTAMVYPEEAEPKQGRIVVFQYSDGKLQTVAEKEVKGAVYSMVEFNGKLLASINSTVRLYEWTTEKDVRTECNHYNNIMALYLKTKGDFILVGDLMRSVLLLAYKPMEGNFEEIARDFNPNWMSAVEILDDDNFLGAENAFNLFVCQKDSAATTDEERQHLQEVGLFHLGEFVNVFCHGSLVMQNLGETSTPTQGSVLFGTVNGMIGLVTSLSESWYNLLLDMQNRLNKVIKSVGKIEHSFWRSFHTERKTEPATGFIDGDLIESFLDISRPKMQEVVANLQYDDGSGMKREATADDLIKVVEELTRIH

SEQ ID NO: 6114 - DNA, 1922 bp, Homo sapien; identical to SEQ ID NO: 927

SEQ ID NO: 6115 - protein, 462 aa, Homo sapien; identical to SEQ ID NO: 928

SEQ ID NO: 6116 - DNA, 7228 bp, Homo sapien
cacgcggccaccgagctggaggaagcggcgggcgtgagaccgggaatgcttgggcccccgccttcctcgcagccatccagcactcggtgcacgccccgcgaggccagcggctgctccctcccggggctattgctgctagtgccgtgagcaccgcccagccattgtctctgtgtctccgtcagccgtgccgagccgcgcacccagaggcgagggcgcgcatggggagcctccgttgatgctgccgcggctgccgcgccgccctccgaggctgcgtcccggggagtccggcttcccgagcgctccggcctggcccggcgccccggacctgagtgcctccccatggaggcgcccgggccggcccaggcggccgcggcggagagcaactcccgagaggtgacggaggatgccgccgactgggcgcccgcgctctgccccagccccgaggcgcggtcgccggaggcgcctgcctaccgcctgcaggactgcgacgcgctggtcaccatgggcactgggacgttcgggcgggtgcacctggtgaaggagaagacagccaagcatttcttcgccctcaaggtgatgagcattcccgacgtcatccgccggaagcaggagcagcacgtgcacaatgagaagtctgtcctgaaggaagtcagccacccgttcctcatcaggctgttctggacgtggcatgaggagcgcttcctctacatgctcatggagtatgtgccgggtggcgagctcttcagctacctgcgcaaccgggggcacttctccagcaccacggggctcttctactctgcggagatcatctgtgccattgagtacctgcactccaaggagatcgtctacagggatttgaagccggagaacatcctgctggatagggatggtcacatcaagctcacggactttgggtttgccaagaagctggtagacaggacttggaccctctgtggaacacccgagtacctagcccccgaagtcattcagagcaagggccacggaagggccgtggactggtgggccctcggcatcctgatattcgagatgctttcggggtttcctccattttttgatgacaacccgtttggcatttatcagaaaattcttgcaggcaaactatatttccccagacatttggatttccatgtaaaaacggggcgaatgatgtgaaccaccatcggtggttccgctccgtggactggaaagctgttccgcagagaaaactgaagcctcccatcgtgcccacgatagctggcaacggcgacacttccaacttcgaaacttaccctgagcatgactgggacacagccgcgcccgtgccgcagaaggatttagaaatcttcaagaatttctgaggacgagctcacatctggaagaaacaggaagattggaatctgcctggaacaaagaactgcacctaagcagaccagaagcaaaatgtcttcttcacggcctgaggacatttccagttttctctgtacctgtgtgtatagaaatagatcagagcacagttgaaattcatggaactggcattatttaagcaaccagaattccacactgtaggaaggttttgaaaattgtttcgttatagattttatcttatcttttggtgttgtcttggtttttctcatagactttataagtttgaactggacttatttgattataaccacaaattgtgtgtgtgtgtgtgtgtgtatatatagaagtcattatggcagatgcacaaattgtgcagtgatgtaaatatacatacttcacagagcctattatttttatttttcaattcagtttctcaaattatcttcccttctcttggggacaacatctgaagggtatgttgcatgcatttttaaaaaaatcatctcatatgcattgtatagtttgggggaataagatatccgggggccgggggtgtctacattcagtatctttagttcttcctacctagtaacttgrgactttaaaagargaaacatggagaagatgtgggagcgaatttattgcaggaatccacaatgactttgaagttgttggagcaatgcattgtattcagaaaacctgtgtcacattaaaaaatttcatctaggctaggtgcagtggcttgttcctgtagtcccagcactctgggaacctgggttgggaggattgcttaaggccaggagtttgagaccagcttgggcaacatagtgaaccctgtctgtatggaatttacacaaattataaaaattagtcgggtgtcattgtgcatacctgtagtcccagctattcaggagctgttgtaggagagattgcctgagctcaagaggttgaggctgcagtgagccctgattgtgccagtgcactccaggctggacgacagagcaagaccctgtattaaaaaaaaaattcatcctgcacagggaaatggctacctattaaagtcccagttgaaattttttgaaaaaatacacctcccacagttcacaaataacttttaagatcagctcatctataaggctgaccttcatgcagagattttatttcacctttagttttgggaaaagcgagaaacagatgatctataggatgtgagtgggtggcagagtcaaaaggaacctcacctgttcctaatttctccttttaaatattcatgttgagtgtgcctaatactctcctcgacaagtcatgctgttttatgcagaataatccaggcgtgagagtgttctcttgggaaatgactggggagacacctgaaaggagcaacccccagatgttcttccctgggtgttgatggcatgacagccatacagtgagtttgttctgaaacatctcttgctaaatgtgggtcatgctagacacagcataaactgagggtgtggggtctggctttgtacataactcattttctcccttgctttttctctggaccatcctggctggaaacttggctgtagacatctgaagagggtgcaccttttctctttactgtgactcacctcaaatatggcattgctcaaatctgctgtgtatgaggtcacagggcccagctgtggcaggggtgagtgcattgaagaagtaggttttggagccttccaggaattccttgttgacaacaggggtacactcacacagacctccaagactttcttctccacctcttctttttctcatgccctgccttcatctgtctccttctgcacccagagtaggggtggagtatacccttgccatgtgttagtgaaaatgtgtgcagtgagaagccagttgggtcccctcggctcctaatctcttctcaaaactcagtagctcaggttctctggagccatccggtgcattccttgctattggagctgtttttccaagcaatatctgggaagagatttctccctctagcacttgctacctctcttctgcacacatatcacacatcagtactgtggagagtttctgttaggaaaagccatacatttttaaaaatgtaggcaaaatgtcaagggaaatgtaatcagatttgggccagagttcgcctacagataagaaggcactggggccaggctcacacctgtaatcctaagtaacactttgggaggctggggcgagaggattgcttgagcccaggagttcaatacctgtctgggaaacacctcatctctacaaaatacaaaaaagttaactgggcatggtggagcatgcctgtagtctcagctactcaggaggctgagatgagaggatcacttgagcctgaggaggtccaggccacagtgatctgagatcacaccattgccctccagcctgggtgacagagtgagaccctgttccaaaaaaaaaaaaaaacccaaaaaacctcaatggctttttgcttttgaaggtggtatgaagagaacgtccactttaaggctttaaaagacagtgaagctggttgtagggctcacttttataatcctaggatttggggaagctgaagcagaaagattgcttgagcctgggagtttgagactggcctgggcagcatagcgagaccccatctctatataaaaaaaaagatgttaaaacagtgaaattacagaaacagaacatagccaccctgtttcatcagtgaccttttcttcacgtgacggtcaactcagtaggtgagaataattagtaggttcagcagaataaactctttacaattaataactcagtggaaaatgatgttcagatggtgaaatgtggaaatgttttagacaactctattttcagcctgtgcttctcactcaccatcctgttgggattaacagttgagggccatcgctgcctaaacatttagcgtgcggtttcccatcagttttactgtgaatgtgaaaaggtgaaactgttgctgacttcggtagcaggtatactaaaattggaatgacacagaggagattagcatggccccctgcgcgaggaagatccgcagattcatgcagcattccatatttttttaaaaaaaggttacactgtgcaccgacgtggagctagaaggaaaagcatgaagtctcatgtttgctgactataaaaataaatcatagtaataatattattgaacattctactttaaaaattattaataaaaccataaatgaaacacttgagcacactttaaaaagtacataaacccatgagtccatatgtgtaattttatgttgtctgttttattatccaggatttcatactcagatgagcattagcatcaggaaagcctgaaatgccttaattgtgaactgatacgcaggaaaatgaaatatgtaagcacattggtgaccttgttctttacagacatcatgatcagcctccagccatacagaacaaatgagaaattagaagcaattccaagaacgtgtgatggtgtgaacccacttttgaccgtcacacacatttcagcatttgaagagacacaggctacctggaaactgcccatggcggggtcataatttaaatgtcccaatgtcatatagaggttaatttaatcaaaatgagctaaaacatggaacaatcactgaataatttaaaaagagtttacctggcagagtgtgtcatgcctgcaatcccagcactttgggaggccaaggcaggcagatcacctgaggtcaggagtttgagaccagcctggccaacatgatgaaacccttgtctctattaaaaacacaaaaattagccagatgtggtggcacatgcctgtaatcccagttagtcgggaggctgaggcaggagaatatggaactcaggaggcggaggctgcagtcaaccaagattgcgccactgcactccagccagggcgaaggagtgagactcccatctcaaaaaataaaaaaaaaaataaataaaaatagttgacccgggtgggcattccaaaatgttcccatagatgatcgtgaaacaatcactgtgcaaaatgtagaggaaaattcttacgataatcacaaaatttgtatcagaaaaacattacaaatttactttgctccatgtaattttatgaattggcagtattttcttaaattgggatacagtaagagaatatctttaggaaatggaaatgttaaaacaagaagtaacaagaggttgtttttctgaagggaaatgccaccggcctgctttcataggcattgataaagccaggaaggaaataaagtcacaaccgaatagtatacactgtatctactgaattcttctaattccttcacaacagaagtctaaatcctgcttagcctaaacatatctatagccagcgatgggcaaattatatttgctgtcagcatgatggaataagaaacagaaaccccccagcagtgggtaagattgcacgcttcatcccctcaaaatgcagttcagccccactccctctccatgcccatcaaacaactgcaaaatcacttgttactgaatttctcattcagcgttttgtttcttttctgtccatattcaagacctttttatttgtttgctttgaagaaaaagcaaaagcaacaaaacaccaaatcatttgaaattccaaccttaaccccccaattttaaaaaaaaattccaccagtggaactaaacagttgagtggtttgggatgtgttgttcgccatttctgtgtttgacctacatggtctctagttctttggacaattgtaactgtgaaactatggcttaacactgttaaagactccaaggctccactctgtagccaggtgcaactcaggctgcacaaataccccaccagaatgtcacaatcattcattgctccagctgctgagtgaacagagtgcaagacagcactggcttgggttttatttttgcagccagttaactttgcatcaggtctacacagtccttgcagcctttgatttctccagttgtacagatttgaaatggggtgcccgggttcctctcgtttttccttcaatctacctagcatgcattttacacacattggaggagtcgatgcactgtttttctcttgctgatggaggcaagaacgccttctaattagtataacttaaatggacgggattgacttaaaagcaagaagaaaagcacatgaacaggtgtcttaatgcatttggatactttggggtgtgtgcctgtctgtgtgtgtgtcttggtgaaggtgggctgtattttcaccaagccttttcataatcaagtttgctttgcaaaccatctgccttgcccccagcagtacagtccttcctaataacggggatgctctgtcatgtttctctgtaaattgttgtgtgttgggaagttctgttgaggcttagtttgatcttccatggtggacatgtctgttctgtatataaaaagcattacatctgtgttttagcaggtgggatttgaagcttttccacagtccttgtgctctgagatggctgttgagctctgctcagctgtcacagctgaattctttttttgtgctgaacactgggcagcctcgccttgttgccaacgtgcttctggggcccctgtgactgctgccggatgctgtgcacacaggcagagtgccttggcaggtttgtgcaccccttggcgagccagaactgggaaccccgcggagtgaccccaccttctcatggggggtcagggaggggagtgcctatttttaatcttgtttgttgcgcaatggaaatcactgtgatttgtacatatgccctaggaaaattttaccgctgtctaatttatgtaataatactgatgattctaggtttgcccaataaactttatatcttttcagaag

SEQ ID NO: 6117 - protein, 277 aa, Homo sapien
MEAPGPAQAAAAESNSREVTEDAADWAPALCPSPEARSPEAPAYRLQDCDALVTMGTGTFGRVHLVKEKTAKHFFALKVMSIPDVIRRKQEQHVHNEKSVLKEVSHPFLIRLFWTWHEERFLYMLMEYVPGGELFSYLRNRGHFSSTTGLFYSAEIICAIEYLHSKEIVYRDLKPENILLDRDGHIKLTDFGFAKKLVDRTWTLCGTPEYLAPEVIQSKGHGRAVDWWALGILIFEMLSGFPPFFDDNPFGIYQKILAGKLYFPRHLDFHVKTGRMM

SEQ ID NO: 6118 - DNA, 1686 bp, Homo sapien; identical to SEQ ID NO: 745

SEQ ID NO: 6119 - protein, 499 aa, Homo sapien; identical to SEQ ID NO: 746

SEQ ID NO: 6120 - DNA, 3026 bp, Homo sapien
ggagcagttccgccgggtttcactgtccgtgacttccttcggggcacctcaggcagcaaaccaagatggagtatgagtggaaacctgacgagcaagggcttcagcaaatcctgcagctgttgaaggagtcccagtccccagacaccaccatccagagaaccgtgcaacaaaaactggaacaacttaatcagtatccagactttaacaactacttgatttttgttcttacaaaattaaaatctgaagatgaacccacaagatcattgagtggtcttatcttgaagaataatgtgaaagcacactttcagaacttcccaaatggtgtaacagactttattaaaagtgaatgtttaaataatattggtgactcctctcctctgattagagccactgttggtattttgatcacaactatagcctccaagggagaattgcagaattggcctgacctcttaccaaaactctgtagcctgttggattctgaagattataatacctgtgagggagcatttggtgcccttcagaagatttgtgaagattctgctgagattttagacagtgatgttttagatcgtcctctcaacatcatgattcccaaatttttacagttcttcaagcatagtagtccaaaaataaggtctcacgctgttgcatgtgtcaatcagtttatcatcagtaggactcaagctctaatgttgcacattgattcttttattgagaatctctttgcattagctggtgatgaagaaccagaggtacggaaaaatgtgtgccgagcacttgtgatgttgctcgaagttcgaatggatcgcctgcttcctcacatgcataatatagttgagtacatgctacagaggactcaagatcaagatgaaaatgtggctttagaagcctgtgaattttggctaactttagctgaacagccaatatgcaaagatgtactcgtaaggcatcttcctaagttgattcctgtgttagtgaatggcatgaagtactcagacatagatattatcctacttaagggtgatgttgaagaagacgaaacgattcctgatagtgaacaggatatacggccacgttttcaccgatcgaggacggtggctcagcagcatgatgaagatggaattgaagaggaagatgatgatgatgatgaaattgatgatgatgatacaatttctgactggaatctaagaaaatgttctgctgctgccctggatgttcttgcaaatgtgtatcgtgatgaactgctgccacatattttgccccttttgaaagaattactttttcatcatgaatgggttgttaaagaatcaggcattttggttttaggagcaattgctgaaggttgcatgcagggcatgattccatacttgcctgagcttattcctcaccttattcagtgcctctctgataaaaaggctcttgtgcgttccataacatgctggactcttagccgctatgcacactgggtggtcagccagccgccagacacgtacctgaagccattaatgacagaattgctaaagcgcatcctggacagcaacaagagagtacaagaagctgcctgcagtgcctttgctaccctagaagaggaggcttgtacagaacttgttccttaccttgcttatatacttgataccctggtctttgcatttagtaaataccagcataagaacctgctcattctttacgatgccataggaacattagcagattcagtaggacatcatttaaacaaaccagaatatattcagatgctaatgcctccactgatccagaaatggaacatgttaaaggatgaagataaagatctcttccctttacttgagtgcctatcttcagttgccacagcactgcagtctggattccttccgtactgtgaacctgtgtatcagcgttgtgtaaacctagtacagaagactcttgcacaagccatgctaaacaatgctcaaccagatcaatatgaagctccagataaagattttatgatagtggctcttgatttactgagtggcctggctgaaggacttggaggcaacattgaacagctggtagcccgaagtaacatcctgacactaatgtatcagtgcatgcaggataaaatgccagaagttcgacagagttcttttgccctgttaggtgacctcacaaaagcttgctttcagcatgttaagccttgtatagctgatttcatgccaatattgggaaccaacctaaatccagaattcatttcagtctgcaacaatgccacatgggcaattggagaaatctccattcaaatgggtatagagatgcagccttatattcctatggtgttgcaccagcttgtagaaatcattaacagacccaacacaccaaagacgttgttagagaatacagcaataacaattggtcgtcttggttacgtttgtcctcaagaggtggcccccatgctacagcagtttataagaccctggtgcacctctctgagaaacataagagacaatgaggaaaaggattcagcattccgtggaatttgtaccatgatcagtgtgaatcccagtggcgtaatccaagattttatatttttttgtgatgccgttgcatcatggattaacccaaaagatgatctcagagacatgttctgtaagatccttcatggatttaaaaatcaagttggcgatgaaaattggaggcgtttctctgaccagtttcctcttcccttaaaagagcgtcttgcagctttttatggtgtttaatctaatacacttaagctgcagtcccaaaattaggggtccttcagtcttggagactataagggagcctctgcacccagggaaaatgttaccctttacaggggggaagggtaaaccagtagggaatacagtacaatcccaaccctactgggaggggcgggagggaggtgttgccgtcactgtattaagtcgatgttgggaaacgttttaacatctggagcctttgtgggtggaaatatgtctccagttacaactccgcagtggatgtgaagaagcaaaaaaaaaaaaaaa

SEQ ID NO: 6121 - protein, 890 aa, Homo sapien; identical to SEQ ID NO: 4258

SEQ ID NO: 6122 - DNA, 2383 bp, Homo sapien
ggggctaccgcgcctttgcttcctggcgcacgcggagcctcctggagcctgccaccatcctgcctactacgtgctgccctgcgcccgcagccatgtgccgcaccctggccgccttccccaccacctgcctggagagagccaaagagttcaagacacgtctggggatctttcttcacaaatcagagctgggctgcgatactgggagtactggcaagtccgagtggggcagtaaacacagcaaagagaatagaaacttctcagaagatgtgctggggtggagagagtcgttcgacctgctgctgagcagtaaaaatggagtggctgccttccacgctttcctgaagacagagttcagtgaggagaacctggagttctggctggcctgtgaggagttcaagaagatccgatcagctaccaagctggcctccagggcacaccagatctttgaggagttcatttgcagtgaggcccctaaagaggtcaacattgaccatgagacccgcgagctgacgaggatgaacctgcagactgccacagccacatgctttgatgcggctcaggggaagacacgtaccctgatggagaaggactcctacccacgcttcctgaagtcgcctgcttaccgggacctggctgcccaagcctcagccgcctctgccactctgtccagctgcagcctggacgagccctcacacacctgagtctccacggcagtgaggaagccagccgggaagagaggttgagtcacccatccccgaggtggctgcccctgtgtgggaggcaggttctgcaaagcaagtgcaagaggacaaaaaaaaaaaaaaaaaaaaaaaaaatgcgctccagcagcctgtttgggaagcagcagtctctccttcagatactgtgggactcatgctggagaggagccgcccacttccaggacctgtgaataagggctaatgatgagggttggtggggctctctgtggggcaaaaaggtggtatgggggttagcactggctctcgttctcaccggagaaggaagtgttctagtgtggtttaggaaacatgtggataaagggaaccatgaaaatgagaggaggaaagacatccagatcagctgttttgcctgttgctcagttgactctgattgcatcctgttttcctaattcccagactgttctgggcacggaagggaccctggatgtggagtcttcccctttggccctcctcactggcctctgggctagcccagagtcccttagcttgtacctcgtaacactcctgtgtgtctgtccagccttgcagtcatgtcaaggccagcaagctgatgtgactcttgccccatgcgagatatttatacctcaaacactggcctgtgagccctttccaagtcagtggagagccctgaaaggaggctcacttgaatccagctcagtgctctgggtggccccctgcaggtggcccctgaccctgcgttgcagcagggtccacctgtgagcaggcccgccctggggcctcttcctggatgtgccctctctgagttctgtgctgtctcttggaggcagggcccaggagaacaaagtgtggaggcctcggggagtggcttttccagctctcatgccccgcagtgtggaacaaggcagaaaaggatcctaggaaataagtctcttggcggtccctgagagtcctgctgaaatccagccagtgttttttgtggtatgagaacaggcaaaaagagatgccccgagatagaaggggagccttgtgtttctttcctgcagacgtgagatgaacactggagtgggcagaggtggcmcaggaccatggcacccttagagtgcagaagctggggggagaggctgcttcgaagggcaggactggggatacctgcctgtcacctcagggcatcactgaacaaacatttcctgatggsaactcctgcggcagagcccaggctggggaagtgaactacccagggcagcccctttgtggcccaggataatcaacactgttctctctgtaccatgagctcctccaggagattatttaagtgtattgtatcattggttttctgtgattgtcataacattgtttttgttattgttggtgctgttgttatttattattgtaatttcagtttgcctctactggagaatctcagcaggggtttcagcctgactgtctccctttctctaccagactctacctctgaatgtgctgggaacctcttggagcctgtcaggaactcctcactgtttaaatatttatttattgtgacaaatggagctggtttcctagatatgaatgatgtttgcaatccccattttcctgtttcagcatgttatattcttataaaataaaagcaaaagtcaaatatgaaaaaaaaaaaaaaaaaaaaa

SEQ ID NO: 6123 - protein, 202 aa, Homo sapien [sequence omitted]

SEQ ID NO: 6124 - DNA, 936 bp, Homo sapien; identical to SEQ ID NO: 3639

SEQ ID NO: 6125 - protein, 195 aa, Homo sapien; identical to SEQ ID NO: 3640

SEQ ID NO: 6126 - DNA, 396 bp, Homo sapien; identical to SEQ ID NO: 1199

SEQ ID NO: 6127 - protein, 61 aa, Homo sapien; identical to SEQ ID NO: 1200

SEQ ID NO: 6128 - DNA, 3664 bp, Homo sapien
gcgctaggtagagcgccgggacctgtgacagggctggtagcagcgcagaggaaaggcggcttttagccaggtatttcagtgtctgtagacaagatggaatcatctccatttaatagacggcaatggacctcactatcattgagggtaacagccaaagaactttctcttgtcaacaagaacaagtcatcggctattgtggaaatattctccaagtaccagaaagcagctgaagaaacaaacatggagaagaagagaagtaacaccgaaaatctctcccagcactttagaaaggggaccctgactgtgttaaagaagaagtgggagaacccagggctgggagcagagtctcacacagactctctacggaacagcagcactgagattaggcacagagcagaccatcctcctgctgaagtgacaagccacgctgcttctggagccaaagctgaccaagaagaacaaatccaccccagatctagactcaggtcacctcctgaagccctcgttcagggtcgatatccccacatcaaggacggtgaggatcttaaagaccactcaacagaaagtaaaaaaatggaaaattgtctaggagaatccaggcatgaagtagaaaaatcagaaatcagtgaaaacacagatgcttcgggcaaaatagagaaatataatgttccgctgaacaggcttaagatgatgtttgagaaaggtgaaccaactcaaactaagattctccgggcccaaagccgaagtgcaagtggaaggaagatctctgaaaacagctattctctagatgacctggaaataggcccaggtcagttgtcatcttctacatttgactcggagaaaaatgagagtagacgaaatctggaacttccacgcctctcagaaacctctataaaggatcgaatggccaagtaccaggcagctgtgtccaaacaaagcagctcaaccaactatacaaatgagctgaaagccagtggtggcgaaatcaaaattcataaaatggagcaaaaggagaatgtgcccccaggtcctgaggtctgcatcacccatcaggaaggggaaaagatttctgcaaatgagaatagcctggcagtccgttccacccctgccgaagatgactcccgtgactcccaggttaagagtgaggttcaacagcctgtccatcccaagccactaagtccagattccagagcctccagtctttctgaaagttctcctcccaaagcaatgaagaagtttcaggcacctgcaagagagacctgcgtggaatgtcagaagacagtctatccaatggagcgtctcttggccaaccagcaggtgtttcacatcagctgcttccgttgctcctattgcaacaacaaactcagtctaggaacatatgcatctttacatggaagaatctattgtaagcctcacttcaatcaactctttaaatctaagggcaactatgatgaaggctttgggcacagaccacacaaggatctatgggcaagcaaaaatgaaaacgaagagattttggagagaccagcccagcttgcaaatgcaagggagacccctcacagcccaggggtagaagatgcccctattgctaaggtgggtgtcctggctgcaagtatggaagccaaggcctcctctcagcaggagaaggaagacaagccagctgaaaccaagaagctgaggatcgcctggccaccccccactgaacttggaagttcaggaagtgccttggaggaagggatcaaaatgtcaaagcccaaatggcctcctgaagacgaaatcagcaagcccgaagttcctgaggatgtcgatctagatctgaagaagctaagacgatcttcttcactgaaggaaagaagccgcccattcactgtagcagcttcatttcaaagcacctctgtcaagagcccaaaaactgtgtccccacctatcaggaaaggctggagcatgtcagagcagagtgaagagtctgtgggtggaagagttgcagaaaggaaacaagtggaaaatgccaaggcttctaagaagaatgggaatgtgggaaaaacaacctggcaaaacaaagaatctaaaggagagacagggaagagaagtaaggaaggtcatagtttggagatggagaatgagaatcttgtagaaaatggtgcagactccgatgaagatgataacagcttcctcaaacaacaatctccacaagaacccaagtctctgaattggtcgagttttgtagacaacacctttgctgaagaattcactactcagaatcagaaatcccaggatgtggaactctgggagggagaagtggtcaaagagctctctgtggaagaacagataaagagaaatcggtattatgatgaggatgaggatgaagagtgacaaattgcaatgatgctgggccttaaattcatgttagtgttagcgagccactgccctttgtcaaaatgtgatgcacataagcaggtatcccagcatgaaatgtaatttacttggaagtaactttggaaaagaattccttcttaaaatcaaaaacaaaacaaaaaaacacaaaaaacacattctaaatactagagataactttacttaaattcttcattttagcagtgatgatatgcgtaagtgctgtaaggcttgtaactggggaaatattccacctgataatagcccagattctactgtattcccaaaaggcaatattaaggtagatagatgattagtagtatattgttacacactattttggaattagagaacatacagaaggaatttaggggcttaaacattacgactgaatgcactttagtataaagggcacagtttgtatatttttaaatgaataccaatttaattttttagtatttacctgttaagagattatttagtctttaaattttttaggttaattttcttgctgtgatatatatgaggaatttactactttatgtcctgctctctaaactacatcctgaactcgacgtcctgaggtataatacaacagagcactttttgaggcaattgaaaaaccaacctacactcttcggtgcttagagagatctgctgtctcccaaataagcttttgtatctgccagtgaatttactgtactccaaatgattgctttcttttctggtgatatctgtgcttctcataattactgaaagctgcaatattttagtaataccttcgggatcactgtcccccatcttccgtgttagagcaaagtgaagagtttaaaggaggaagaagaaagaactgtcttacaccacttgagctcagacctctaaaccctgtatttcccttatgatgtcccctttttgagacactaatttttaaatacttactagctctgaaatatattgatttttatcacagtattctcagggtgaaattaaaccaactataggcctttttcttgggatgattttctagtcttaaggtttggggacattataaacttgagtacatttgttgtacacagttgatattccaaattgtatggatgggagggagaggtgtcttaagctgtaggcttttctttgtactgcatttatagagatttagctttaatattttttagagatgtaaaacattctgctttcttagtcttacctagtctgaaacatttttattcaataaagattttaattaaaatttgaaaaaaaaaaaaaaaaa

SEQ ID NO: 6129 - protein, 759 aa, Homo sapien; identical to SEQ ID NO: 3101

SEQ ID NO: 6130 - DNA, 3195 bp, Homo sapien; identical to SEQ ID NO: 467

SEQ ID NO: 6131 - protein, 601 aa, Homo sapien; identical to SEQ ID NO: 468

SEQ ID NO: 6132 - DNA, 4799 bp, Homo sapien
ccgccgccactgccgtcgggtaaggtcccagcacggacatggcctcgcgcggcgcccgcccgggcccgagtcccccgcgccccgctttgtagccccccggcggagaggcggcctcgacggtgcggacggcgcagacggccgggcgggcggcatggaggcggcgcatctgctcccggccgccgacgtgctgcgccacttctcggtgacagccgagggcggcctgagcccggcgcaggtgaccggcgcgcgggagcgctacggccccaacgagctcccgagtgaggaagggaagtccctgtgggagctggtgctggaacagtttgaggacctcctggtgcgcatcctgctgctggctgcccttgtctcctttgtcctggcctggttcgaggagggcgaggagaccacgaccgccttcgtggagcccctggtcatcatgctgatcctcgtggccaacgccattgtgggcgtgtggcaggaacgcaacgccgagagtgccatcgaggccctgaaggagtatgagcctgagatgggcaaggtgatccgctcggaccgcaagggcgtgcagaggatccgtgcccgggacatcgtcccaggggacattgtagaagtggcagtgggggacaaagtgcctgctgacctccgcctcatcgagatcaagtccaccacgctgcgagtggaccagtccatcctgacgggtgaatctgtgtccgtgaccaagcacacagaggccatcccagaccccagagctgtgaaccaggacaagaagaacatgctgttttctggcaccaatatcacatcgggcaaagcggtgggtgtggccgtggccaccggcctgcacacggagctgggcaagatccggagccagatggcggcagtcgagcccgagcggacgccgctgcagcgcaagctggacgagtttggacggcagctgtcccacgccatctctgtgatctgcgtggccgtgtgggtcatcaacatcggccacttcgccgacccggcccacggtggctcctggctgcgtggcgctgtctactacttcaagatcgccgtggccctggcggtggcggccatccccgagggcctcccggctgtcatcactacatgcctggcactgggcacgcggcgcatggcacgcaagaacgccatcgtgcgaagcctgccgtccgtggagaccctgggctgcacctcagtcatctgctccgacaagacgggcacgctcaccaccaatcagatgtctgtctgccggatgttcgtggtagccgaggccgatgcgggctcctgccttttgcacgagttcaccatctcgggtaccacgtatacccccgagggcgaagtgcggcagggggatcagcctgtgcgctgcggccagttcgacgggctggtggagctggcgaccatctgcgccctgtgcaacgactcggctctggactacaacgaggccaagggtgtgtatgagaaggtgggagaggccacggagacagctctgacttgcctggtggagaagatgaacgtgttcgacaccgacctgcaggctctgtcccgggtggagcgagctggcgcctgtaacacggtcatcaagcagctgatgcggaaggagttcaccctggagttctcccgagaccggaaatccatgtccgtgtactgcacgcccacccgccctcaccctactggccagggcagcaagatgtttgtgaagggggctcctgagagtgtgatcgagcgctgtagctcagtccgcgtggggagccgcacagcacccctgacccccacctccagggagcagatcctggcaaagatccgggattggggctcaggctcagacacgctgcgctgcctggcactggccacccgggacgcgcccccaaggaaggaggacatggagctggacgactgcagcaagtttgtgcagtacgagacggacctgaccttcgtgggctgcgtaggcatgctggacccgccgcgacctgaggtggctgcctgcatcacacgctgctaccaggcgggcatccgcgtggtcatgatcacgggggataacaaaggcactgccgtggccatctgccgcaggcttggcatctttggggacacggaagacgtggcgggcaaggcctacacgggccgcgagtttgatgacctcagccccgagcagcagcgccaggcctgccgcaccgcccgctgcttcgcccgcgtggagcccgcacacaagtcccgcatcgtggagaacctgcagtcctttaacgagatcactgctatgactggcgatggagtgaacgacgcaccagccctgaagaaagcagagatcggcatcgccatgggctcaggcacggccgtggccaagtcggcggcagagatggtgctgtcagatgacaactttgcctccatcgtggctgcggtggaggagggccgggccatctacagcaacatgaagcaattcatccgctacctcatctcctccaatgttggcgaggtcgtctgcatcttcctcacggcaattctgggcctgcccgaagccctgatccctgtgcagctgctctgggtgaacctggtgacagacggcctacctgccacggctctgggcttcaacccgccagacctggacatcatggagaagctgccccggagcccccgagaagccctcatcagtggctggctcttcttccgatacctggctatcggagtgtacgtaggcctggccacagtggctgccgccacctggtggtttgtgtatgacgccgagggacctcacatcaacttctaccagctgaggaacttcctgaagtgctccgaagacaacccgctctttgccggcatcgactgtgaggtgttcgagtcacgcttccccaccaccatggccttgtccgtgctcgtgaccattgaaatgtgcaatgccctcaacagcgtctcggagaaccagtcgctgctgcggatgccgccctggatgaacccctggctgctggtggctgtggccatgtccatggccctgcacttcctcatcctgctcgtgccgcccctgcctctcattttccaggtgaccccactgagcgggcgccagtgggtggtggtgctccagatatctctgcctgtcatcctgctggatgaggccctcaagtacctgtcccggaaccacatgcacgcctgtctttatccaggccttctcaggacagtctcgcaggcctggagtaggcagccgctgaccacctcttggaccccagaccacaccgggttggcctctttgaagaaatgagccagaagtgagcgctgggaacagagtggagtctccggtgtgtacctcagactgatggtgcccatgtgttcgcctccgccccccacccttgccaccacactcgcccacttgcccaccgggtcccgccggataaatgacaggcccgaggtcagaatggccatccccgggccccgtcctggggtctctgtccccacttccttctggcctgggaggtctgtaattcctgtctcctggactctcctgggaagttccctgctctgcagctctggcccaggagctgcaggctgggagggggcagccaagaagccggagctggcagcatacccagagatccggggcccccccacccccaaatcacgagtgcagctggagcttgctcccccttgttcggaagctggacgttcacttggtgactggtgcctctgcactgacggaggactctgggggtccttcttaccggctctgacctctctcttcgtgcctggtctgggactgggtcagccctgggggatcagaaggggccatctgggcccagctgtgtacagcgagggtgggcagccccctccactccactctgcttccacaaagtcggctcccgagagctcgaggctgcttctgtttatatgtgcagggcccgggcgggtgaagggtcagagagacggacacaaggagccggcaggagggcggagcgaggatgtcctttcccgggagacaagtcgggaaagcctggctggactgcctcagccccgcgcgcctcctggactcagggttccccgtcctgagctcgggagatgttcagagtcacactgccgcccggtctgccacgcagaggtccaacttgccacccgcgtccctggtacctgagaccaccgacatcctcaggttcctgaccgtggcgcccttctacccagcccagtgtgcggccgccgcgctgtctgcacagctgggggcctctgagcctggtgggcttcctggactcttggcctcactccttgccccctccccacgacacccatgagccgaaaggatgtcactaaggatggctgattccccaagggcacccgctctccctccctccctgctggaggaacacgtcatatcagatgagaggaagatggcctctgatggacagaatttttctcttaactcagcttttgctactttggcaaaaactagcgaggggtagcagaaacctgcaccaaggattgtccctatgtcttggccactcctagagcgtgtgcagactgatgattttatatgtaaatcaagactcacatccctttcctagtcccccacatccaaagcccctcagcctgccttgcagaccaatgggctccatgttctgtagccccctcccctacgcctcacccctcctccctctcacaggttctgggcggccagtgagagaaacgcagtgggggaggcagggagtctggtgcctgcagagattctctgcttctttcctggggggaggtggggaggtcttagcaggagcgggccctgtacccacctgctgacctgctgtttggtagagaaataaaggttgtgtgactggggg

SEQ ID NO: 6133 - protein, 1029 aa, Homo sapien
MEAAHLLPAADVLRHFSVTAEGGLSPAQVTGARERYGPNELPSEEGKSLWELVLEQFEDLLVRILLLAALVSFVLAWFEEGEETTTAFVEPLVIMLILVANAIVGVWQERNAESAIEALKEYEPEMGKVIRSDRKGVQRIRARDIVPGDIVEVAVGDKVPADLRLIEIKSTTLRVDQSILTGESVSVTKHTEAIPDPRAVNQDKKNMLFSGTNITSGKAVGVAVATGLHTELGKIRSQMAAVEPERTPLQRKLDEFGRQLSHAISVICVAVWVINIGHFADPAHGGSWLRGAVYYFKIAVALAVAAIPEGLPAVITTCLALGTRRMARKNAIVRSLPSVETLGCTSVICSDKTGTLTTNQMSVCRMFVVAEADAGSCLLHEFTISGTTYTPEGEVRQGDQPVRCGQFDGLVELATICALCNDSALDYNEAKGVYEKVGEATETALTCLVEKMNVFDTDLQALSRVERAGACNTVIKQLMRKEFTLEFSRDRKSMSVYCTPTRPHPTGQGSKMFVKGAPESVIERCSSVRVGSRTAPLTPTSREQILAKIRDWGSGSDTLRCLALATRDAPPRKEDMELDDCSKFVQYETDLTFVGCVGMLDPPRPEVAACITRCYQAGIRVVMITGDNKGTAVAICRRLGIFGDTEDVAGKAYTGREFDDLSPEQQRQACRTARCFARVEPAHKSRIVENLQSFNEITAMTGDGVNDAPALKKAEIGIAMGSGTAVAKSAAEMVLSDDNFASIVAAVEEGRAIYSNMKQFIRYLISSNVGEVVCIFLTAILGLPEALIPVQLLWVNLVTDGLPATALGFNPPDLDIMEKLPRSPREALISGWLFFRYLAIGVYVGLATVAAATWWFVYDAEGPHINFYQLRNFLKCSEDNPLFAGIDCEVFESRFPTTMALSVLVTIEMCNALNSVSENQSLLRMPPWMNPWLLVAVAMSMALHFLILLVPPLPLIFQVTPLSGRQWVVVLQISLPVILLDEALKYLSRNHMHACLYPGLLRTVSQAWSRQPLTTSWTPDHTGLASLKK

SEQ ID NO: 6134 - DNA, 1196 bp, Homo sapien; identical to SEQ ID NO: 3431

SEQ ID NO: 6135 - protein, 295 aa, Homo sapien; identical to SEQ ID NO: 3432

SEQ ID NO: 6136 - DNA, 723 bp, Homo sapien; identical to SEQ ID NO: 2912

SEQ ID NO: 6137 - protein, 240 aa, Homo sapien; identical to SEQ ID NO: 2866

SEQ ID NO: 6138 - DNA, 2681 bp, Homo sapien
cggccgcgtcctcaagccggcacctgagcggcggagacggctgtagcacaaggatctgcatctccaatggatactgaggggtttggtgagctccttcagcaagctgaacagcttgctgctgagactgagggcatctcagagcttccccatgtggaacggaacttacaggagatccagcaggcgggagagcgcctgcgttcccgtaccctaacacgcacgtcccaggagacggcagatgtcaaggcgtcagttctcctcgggtctcggggacttgacatatcccacatctcccagcgattggagagtctgagtgcagccaccacctttgagcctcttgagcctgtgaaggacactgacattcagggcttcctgaagaatgagaaggacaatgccctgctgtctgccatcgaagagtcccggaagaggaccttcggcatggctgaggagtaccatcgggagtcaatgttggttgagtgggagcaagtgaaacagcgaattctgcacacactgctggcatcaggagaagacgcccttgactttactcaagaaagcgagccaagctacatcagtgatgtgggaccccctggtcgaagctctctggataacatcgagatggcctatgcgcggcaaatttatatctataatgagaaaattgtaaatggacacctgcagcctaacctggtggacctttgtgcttccgtcgcagagctggatgataagagcatttccgacatgtggaccatggtaaaacaaatgacagacgtgttgttgacaccggcaacggatgccctgaagaaccgcagcagcgtggaagtgcgcatggagtttgtcaggcaggccttggcgtaccttgagcagagttataagaattacacccttgtgactgtctttggaaatttgcatcaggcccagctgggcggggtgcctgggacttaccaattggttcgaagtttcctgaacattaaactgccagctcccttgcctggactacaggatggagaggtggaaggccatcctgtgtgggcgctaatttactactgcatgcgctgtggagacctgcttgccgcttcacaggtagttaatcgagcccagcaccagctgggagagtttaaaacctggttccaggagtacatgaacagcaaggacagaagattgtccccagctacggaaaacaagctccggctgcattaccgtagggccctcaggaacaatacagatccctacaagcgggccgtgtactgtatcattggcagatgtgacgtcaccgacaaccagagtgaagtggcggacaaaactgaggattacctgtggctgaagttgaaccaagtgtgttttgacgacgatggcaccagctccccacaagacaggctcactctctcacagttccagaagcagttgttggaagactatggcgagtcccactttacggtgaaccagcaacccttcctctacttccaagtcctgttcctgacagcgcagtttgaagcagcagttgcctttcttttccgcatggagcggctgcgctgccatgctgtccatgtagcactggtgctgtttgagctgaagctgcttttaaagtcctctggacagagtgctcagctcctcagccacgagcctggtgaccctccttgcttgcggcggctgaacttcgtgcggctcctcatgctgtacacccggaagtttgagtccacggacccaagggaggccctccagtacttctatttcctcagggatgagaaagatagtcaaggagaaaacatgtttctgcgctgtgtgagtgagcttgtgattgaaagccgagagttcgatatgattcttgggaaactagagaatgacggaagtagaaagcctggagtcatagataagtttactagtgacacaaagcctattatcaacaaagttgcttctgtggcagaaaataaaggactgtttgaagaggcagcaaagctgtatgaccttgccaagaatgctgacaaggtactggagctgatgaacaaactgctgagccctgtcgtcccccagatcagtgccccgcaatccaacaaggagaggctgaagaacatggcactctccattgccgaacggtatagggctcaaggaataagcgcaaataaatttgtggactccacgttctatcttcttttggacttgatcaccttttttgacgagtatcatagtggtcatattgatagagcttttgatatcattgagcgcttgaagctggtgcccctgaatcaggaaagtgtggaagagagagtggctgctttcagaaatttcagtgatgaaatcaggcacaacctctcagaagtgcttcttgccaccatgaacatcttgttcacacagtttaagaggctcaaggggacaagtccatcctcgtcatccaggccccagcgagtcatcgaggaccgcgactctcaactccgaagtcaagcccgcactctgattacctttgctggaatgataccataccgaacgtctggggacaccaatgcgaggctggtgcagatggaggtcctcatgaattaagtgccatgctttgtgggagtctgggtcggcacactgtcagtacatcaggcacatgggcccactaggctggggtttctggttttgtttctgttgtgttttgttttggtttctgtattatgtatttttgtcaacgccaataaatttctttgatttgt

SEQ ID NO: 6139 - protein, 819 aa, Homo sapien
MDTEGFGELLQQAEQLAAETEGISELPHVERNLQEIQQAGERLRSRTLTRTSQETADVKASVLLGSRGLDISHISQRLESLSAATTFEPLEPVKDTDIQGFLKNEKDNALLSAIEESRKRTFGMAEEYHRESMLVEWEQVKQRILHTLLASGEDALDFTQESEPSYISDVGPPGRSSLDNIEMAYARQIYIYNEKIVNGHLQPNLVDLCASVAELDDKSISDMWTMVKQMTDVLLTPATDALKNRSSVEVRMEFVRQALAYLEQSYKNYTLVTVFGNLHQAQLGGVPGTYQLVRSFLNIKLPAPLPGLQDGEVEGHPVWALIYYCMRCGDLLAASQVVNRAQHQLGEFKTWFQEYMNSKDRRLSPATENKLRLHYRRALRNNTDPYKRAVYCIIGRCDVTDNQSEVADKTEDYLWLKLNQVCFDDDGTSSPQDRLTLSQFQKQLLEDYGESHFTVNQQPFLYFQVLFLTAQFEAAVAFLFRMERLRCHAVHVALVLFELKLLLKSSGQSAQLLSHEPGDPPCLRRLNFVRLLMLYTRKFESTDPREALQYFYFLRDEKDSQGENMFLRCVSELVIESREFDMILGKLENDGSRKPGVIDKFTSDTKPIINKVASVAENKGLFEEAAKLYDLAKNADKVLELMNKLLSPVVPQISAPQSNKERLKNMALSIAERYRAQGISANKFVDSTFYLLLDLITFFDEYHSGHIDRAFDIIERLKLVPLNQESVEERVAAFRNFSDEIRHNLSEVLLATMNILFTQFKRLKGTSPSSSSRPQRVIEDRDSQLRSQARTLITFAGMIPYRTSGDTNARLVQMEVLMN

SEQ ID NO: 6140 - DNA, 1209 bp, Homo sapien
cagggctgggcggcggcggcggcggcggtcatggaacgccaagaggagtctctgtccgcgcggccggccctggagaccgaggggctgcgcttcctgcacaccacggtgggctccctgctggccacctatggctggtacatcgtcttcagctgcatccttctctacgtggtctttcagaagctttccgcccggctaagagccttgaggcagaggcagctggaccgagctgcggctgctgtggaacctgatgttgttgttaaacgacaagaagctttagcagctgctcgactgaaaatgcaagaagaactaaatgcgcaagttgaaaagcataaggaaaaactgaaacaacttgaagaagaaaaaaggagacagaagattgaaatgtgggacagcatgcaagaaggaaaaagttacaaaggaaatgcaaagaagccccaggaggaagacagtcctgggccttccacttcatctgtcctgaaacggaaatcggacagaaagcctttgcggggaggaggttataacccgttgtctggtgaaggaggcggacttgctcctggagacctggacgcagaggcccgtcatctggcggatgaggctaagaatcttgttagtgtcacttttgacattagcaagatgaacccttaaccctcgattcaattgccttacgcacgcttttcacagtgactagccaaggggaggtggggttgatttctgttcctaactacacctgcatatgtcagggctccagtcagcaaaaggtatagatgttgcctctaggcatgaggtcattggtcacattctacttggagacagtgattgcattcattgatttcatggttaattgctagttggtaggtaaaggcctctagatgattagcaatcttgataaaagaggcctagtaatgttcttttgaggttagaaatccttgctgctaggacagtctctgtgacaggttgcgttgaatgatgtcttccttatcaatggtgagcccaccagtgaggattactgatgtggacagttgatggggtttgtttctgtatatttatttttatgtacagaactttgtaaaaacgaaactatttaaaaaacaagaataacatttttagcatctttattcaaggagatttatggacttcaatttgtctatcaaacattaaatagctttttattacaacctccaaaaaaaaaaaaaaaaaaaaaaaaaaaaa

SEQ ID NO: 6141 - protein, 204 aa, Homo sapien
MERQEESLSARPALETEGLRFLHTTVGSLLATYGWYIVFSCILLYVVFQKLSARLRALRQRQLDRAAAAVEPDVVVKRQEALAAARLKMQEELNAQVEKHKEKLKQLEEEKRRQKIEMWDSMQEGKSYKGNAKKPQEEDSPGPSTSSVLKRKSDRKPLRGGGYNPLSGEGGGLAPGDLDAEARHLADEAKNLVSVTFDISKMNP

SEQ ID NO: 6142 - DNA, 10412 bp, Homo sapien; identical to SEQ ID NO: 893

SEQ ID NO: 6143 - protein, 2261 aa, Homo sapien
MACWPQLRLLLWKNLTFRRRQTCQLLLEVAWPLFIFLILISVRLSYPPYEQHECHFPNKAMPSAGTLPWVQGIICNANNPCFRYPTPGEAPGVVGNFNKSIVARLFSDARRLLLYSQKDTSMKDMRKVLRTLQQIKKSSSNLKLQDFLVDNETFSGFLYHNLSLPKSTVDKMLRADVILHKVFLQGYQLHLTSLCNGSKSEEMIQLGDQEVSELCGLPREKLAAAERVLRSNMDILKPILRTLNSTSPFPSKELAEATKTLLHSLGTLAQELFSMRSWSDMRQEVMFLTNVNSSSSSTQIYQAVSRIVCGHPEGGGLKIKSLNWYEDNNYKALFGGNGTEEDAETFYDNSTTPYCNDLMKNLESSPLSRIIWKALKPLLVGKILYTPDTPATRQVMAEVNKTFQELAVFHDLEGMWEELSPKIWTFMENSQEMDLVRMLLDSRDNDHFWEQQLDGLDWTAQDIVAFLAKHPEDVQSSNGSVYTWREAFNETNQAIRTISRFMECVNLNKLEPIATEVWLINKSMELLDERKFWAGIVFTGITPGSIELPHHVKYKIRMDIDNVERTNKIKDGYWDPGPRADPFEDMRYVWGGFAYLQDVVEQAIIRVLTGTEKKTGVYMQQMPYPCYVDDIFLRVMSRSMPLFMTLAWIYSVAVIIKGIVYEKEARLKETMRIMGLDNSILWFSWFISSLIPLLVSAGLLVVILKLGNLLPYSDPSVVFVFLSVFAVVTILQCFLISTLFSRANLAAACGGIIYFTLYLPYVLCVAWQDYVGFTLKIFASLLSPVAFGFGCEYFALFEEQGIGVQWDNLFESPVEEDGFNLTTSVSMMLFDTFLYGVMTWYIEAVFPGQYGIPRPWYFPCTKSYWFGEESDEKSHPGSNQKRISEICMEEEPTHLKLGVSIQNLVKVYRDGMKVAVDGLALNFYEGQITSFLGHNGAGKTTTMSILTGLFPPTSGTAYILGKDIRSEMSTIRQNLGVCPQHNVLFDMLTVEEHIWFYARLKGLSEKHVKAEMEQMALDVGLPSSKLKSKTSQLSGGMQRKLSVALAFVGGSKVVILDEPTAGVDPYSRRGIWELLLKYRQGRTIILSTHHMDEADVLGDRIAIISHGKLCCVGSSLFLKNQLGTGYYLTLVKKDVESSLSSCRNSSSTVSYLKKEDSVSQSSSDAGLGSDHESDTLTIDVSAISNLIRKHVSEARLVEDIGHELTYVLPYEAAKEGAFVELFHEIDDRLSDLGISSYGISETTLEEIFLKVAEESGVDAETSDGTLPARRNRRAFGDKQSCLRPFTEDDAADPNDSDIDPESRETDLLSGMDGKGSYQVKGWKLTQQQFVALLWKRLLIARRSRKGFFAQIVLPAVFVCIALVFSLIVPPFGKYPSLELQPWMYNEQYTFVSNDAPEDTGTLELLNALTKDPGFGTRCMEGNPIPDTPCQAGEEEWTTAPVPQTIMDLFQNGNWTMQNPSPACQCSSDKIKKMLPVCPPGAGGLPPPQRKQNTADILQDLTGRNISDYLVKTYVQIIAKSLKNKIWVNEFRYGGFSLGVSNTQALPPSQEVNDAIKQMKKHLKLAKDSSADRFLNSLGRFMTGLDTKNNVKVWFNNKGWHAISSFLNVINNAILRANLQKGENPSHYGITAFNHPLNLTKQQLSEVALMTTSVDVLVSICVIFAMSFVPASFVVFLIQERVSKAKHLQFISGVKPVIYWLSNFVWDMCNYVVPATLVIIIFICFQQKSYVSSTNLPVLALLLLLYGWSITPLMYPASFVFKIPSTAYVVLTSVNLFIGINGSVATFVLELFTDNKLNNINDILKSVFLIFPHFCLGRGLIDMVKNQAMADALERFGENRFVSPLSWDLVGRNLFAMAVEGVVFFLITVLIQYRFFIRPRPVNAKLSPLNDEDEDVRRERQRILDGGGQNDILEIKELTKIYRRKRKPAVDRICVGIPPGECFGLLGVNGAGKSSTFKMLTGDTTVTRGDAFLNKNSILSNIHEVHQNMGYCPQFDAITELLTGREHVEFFALLRGVPEKEVGKVGEWAIRKLGLVKYGEKYAGNYSGGNKRKLSTAMALIGGPPVVFLDEPTTGMDPKARRFLWNCALSVVKEGRSVVLTSHSMEECEALCTRMAIMVNGRFRCLGSVQHLKNRFGDGYTIVVRIAGSNPDLKPVQDFFGLAFPGSVLKEKHRNMLQYQLPSSLSSLARIFSILSQSKKRLHIEDYSVSQTTLDQVFVNFAKDQSDDDHLKDLSLHKNQTVVDVAVLTSFLQDEKVKESYV

SEQ ID NO: 6144 - DNA, 3697 bp, Homo sapien; identical to SEQ ID NO: 3207

SEQ ID NO: 6145 - protein, 1067 aa, Homo sapien; identical to SEQ ID NO: 3208

SEQ ID NO: 6146 - DNA, 3103 bp, Homo sapien
ctgtgacactgccagcagcgcgcagagggagggatgggggcgggtatcggcgtaggggccctcggaaagaacggatattgctgtgacaccgcggggacgctctgaagggacgagtgtcggtgtggcaccggtgcacgctgaaggagccggcggaaccgggtggccatggggatgtgggcatcgctggacgctttgtgggagatgccggccgagaagcgtatcttcggggccgtgctgctcttttcctggacagtgtatctttgggagaccttcctagcacagcggcagagaaggatatataaaacaacaactcatgtaccaccggagttaggacagatcatggattctgaaacatttgagaaatctcgactctatcaactggataaaagcactttcagcttctggtcaggactctattcagagactgaaggcactcttattcttctctttggaggaataccttatctctggagactttctggacggttctgtggttatgctggctttggaccagaatatgagatcactcagtccctggtgtttctgctgttggctacacttttcagtgcattgactggtttgccatggagtctttataatacttttgtgatagaagaaaaacatggcttcaatcaacagactttggggttcttcatgaaagatgcaatcaagaaatttgttgtgactcagtgtattttgttgcctgtgtcttcacttctactttacattattaaaattgggggtgactatttttttatttatgcctggctgttcacattagttgtgtctctggttcttgtcacaatctatgctgattatattgcccctttatttgacaaattcacacctctgcctgagggaaagcttaaagaagaaattgaagtaatggcaaagagtattgactttcctttgacgaaggtgtatgttgtggaaggatctaaacgctcttcccacagcaatgcttatttttatggcttcttcaagaacaagcgaatagttttgtttgacactctactagaagagtactctgtactaaacaaagacatccaggaggattctggcatggaaccccgcaatgaggaagaagggaacagtgaagaaataaaagctaaagttaaaaataagaaacaaggatgtaaaaatgaggaggtactcgctgtactaggccatgaactggggcactggaagttgggacatacagtcaaaaatatcattattagccagatgaattctttcctgtgtttttttttatttgctgtattaattggtcgaaaggagctttttgctgcatttggtttttatgatagccaacccactcttattggactattgatcatcttccagtttattttttcaccttacaatgaggttctttctttttgcctaacagtcctaagccgcagatttgagtttcaagctgatgcatttgccaagaaacttgggaaggctaaagacttatattctgctttaatcaaacttaacaaagataacttgggattccctgtttctgactggttgttctcaatgtggcattattctcatcctccactgctagagagacttcaagctttgaaaactatgaagcaacactgagatgtccaggatctgtgactgaagacatttctgattatttctgtcctggcagcatgttccagctcttgatgtttttaaacttttttttagaagaaaaattaagtacagaaaagcccagatttaaatacatttaatatgtcattttaaaaatgattttaataattcatttcttaaaacactgaatgaattttgaagcttaatgtttttaaaggcatagttttatctttgacatctaatttaccatcaagttgtaaaattatttggaaaaatacagaactcgttttatttgtatacttatatggaatctgcatgtgaggtgtttgagggcatatgtttgaaagagggagcatcaccacaggaatcctttctgtgaggtggaaacagtggtcctgaatcattgtgctcacacctaacttgaaatctggtcttactttcatgctgttatgatttcacctggtgaatcagtgttttaaataagaaaggtaatagttggtaaggccaatgttatttaaatgaaagtagttagaaaaatgctctcctattctaccaaatttttaatttctttcttccctttcttgctacacagtgatcaagagtttctcatagtgctttgaagttagaaattatgtataggatattttaaatcattgagttttgtggggtttttttgtttgtttgtttcttttgttttttggaaaatccgtgtctttatctttttttcccacgtggtagatatgatcccattggaggtaaattgtagcttcttctcattcatgcagtaaataatacatcctttcactcagcagagatggccatattaaacacgttttgctatgttaaaagtggcagaacaggaaagacgaattaaaaataacattttttaagcgacataaggatgaaatactgatgaatctctgtgacattacagggaaaaaaatatagttttctatctctttcaagggcagaagagttttcatttttatttttgtaattttatctgtaagtcataaatattacttaatcaggcctgattctacttttgaaaattacagttcttgaaatgcagataatgtttactttgaaaacaaatgtcatgaatgatttccagtttttaaagctatatgtttcactgcttcatatctctgtccactttctgaatgagaacttattttgtgcctagagctctcactcactgataatgcttattaccttctgggcatttattccaaagtgggatcaactgtacgcctttggtatctgaccataaagtcttttgctccgctgacatttgggtgatgtcttcacatggaaatataataaaaataaaaatctagtttaatactgcattatttattttcctaaggctaaagaggagcagtcctatgcttttattcagcatcctttatctgtgacttcatgctctgataactgcctttccttccttctgtgcctttgaatacaaatttcagttctgcaaaagtgaaacattaaacattgccaacgcaaatgt

SEQ ID NO: 6147 - protein, 475 aa, Homo sapien
MGMWASLDALWEMPAEKRIFGAVLLFSWTVYLWETFLAQRQRRIYKTTTHVPPELGQIMDSETFEKSRLYQLDKSTFSFWSGLYSETEGTLILLFGGIPYLWRLSGRFCGYAGFGPEYEITQSLVFLLLATLFSALTGLPWSLYNTFVIEEKHGFNQQTLGFFMKDAIKKFVVTQCILLPVSSLLLYIIKIGGDYFFIYAWLFTLVVSLVLVTIYADYIAPLFDKFTPLPEGKLKEEIEVMAKSIDFPLTKVYVVEGSKRSSHSNAYFYGFFKNKRIVLFDTLLEEYSVLNKDIQEDSGMEPRNEEEGNSEEIKAKVKNKKQGCKNEEVLAVLGHELGHWKLGHTVKNIIISQMNSFLCFFLFAVLIGRKELFAAFGFYDSQPTLIGLLIIFQFIFSPYNEVLSFCLTVLSRRFEFQADAFAKKLGKAKDLYSALIKLNKDNLGFPVSDWLFSMWHYSHPPLLERLQALKTMKQH

SEQ ID NO: 6148 - DNA, 2095 bp, Homo sapien; identical to SEQ ID NO: 427

SEQ ID NO: 6149 - protein, 292 aa, Homo sapien; identical to SEQ ID NO: 428

SEQ ID NO: 6150 - DNA, 4020 bp, Homo sapien; identical to SEQ ID NO: 3147

SEQ ID NO: 6151 - protein, 524 aa, Homo sapien; identical to SEQ ID NO: 3148

SEQ ID NO: 6152 - DNA, 2844 bp, Homo sapien; identical to SEQ ID NO: 3503

SEQ ID NO: 6153 - protein, 422 aa, Homo sapien; identical to SEQ ID NO: 3504

SEQ ID NO: 6154 - DNA, 1109 bp, Homo sapien; identical to SEQ ID NO: 3098

SEQ ID NO: 6155 - protein, 261 aa, Homo sapien; identical to SEQ ID NO: 3099

SEQ ID NO: 6156 - DNA, 2401 bp, Homo sapien
gattggaagcagaggaagctgaagaaaagtaatgtagtttccttaaaggcatacaaaggactggcagaagtcgctgtgaagagcttgtgtgagctgttggtggcactacctcattttaactttcacaacaacatcatcgtattgattgtccctctcatgaatgacatgtcaaaattgatatctgaaatgtgttgtgaagctgtgaagaaactctttaagcaagataaattaggccaagcttctcttggtgtaattaaagtgatttctggttttgtgaagggcagaaattacgaagttaggccagagatgttaaaaacatttttatgcctaagaatcaaggaagtagaagtgaaaaaagatacagaagacattaataaaccaaaaaaatttatgactttcaaagaaaagagaaaatctctatcaagaatgcagagaaagtggaagaaagcagaagagaaactagcgcgagagcttcgagaggcagaagcttcagagagtactgagaaaaaacttaaactgcacacagagactctgaatattgtgtttgtaacctacttcagaatattgaagaaggcccagaggtcacctctcctgccagcagttctagaaggtcttgccaagtttgctcaccttataaatgtggaattttttgatgatctgttagtagttcttcatactctcattgagtctggtgacctaagctatcaagaaagtcttcactgtgtccagactgcttttcatattctttctggacaaggtgatgttctgaatattgatccattgaaattctacacacatctctacaaaacactgttcaaattacatgcaggtgctaccaatgaaggtgttgagattgtactccagtgccttgatgtcatgctaactaagcgcagaaagcaagtttctcagcagcgagctcttgccttcatcaaacgcctttgtacccttgctcttcatgttcttccaaattcaagtattggcattttagcaactaccagaatattaatgcatactttccccaaaacagatctactgcttgacagtgaatctcagggaagtggagttttccttcctgaactggatgagcctgagtactgcaatgctcagaacactgctctgtgggaactgcatgctctgcggaggcattatcatcccatagtgcagagatttgcagcccacctgatcgctggagcaccttctgaaggctctggagcactcaaaccagagttgagtcgaagatctgctactgaactttttgaggcatatagcatggcagaaatgacattcaatcctcctgttgaatcttcaaaccccaaaataaagggtaaatttttacaaggggattcatttttgaatgaagatttaaatcagctaatcaaaagatactccagtgaagttgctactgaatcgcctctggatttcacgaaatatttgaaaacatcactacactagtagaggaatgaagtcagtggactttcttgtatatttgtgtgtgcagatgtacataaagatgagttgttaacttaggatcttttctttttatacaaggaaagcttcctaagaatgtctaggaagaagaggaagaatgaccctttgcatggcacagggttctgcccctattctgaatatgtcattccatcaaggagatcaaaagcctttttttctccccagtatttggaaattactttcttgatgatgctgccttttaaaagcttcacgtacattatagttttttaaaaaaatctttggactggatcttactgaagtgcagttgctatattaaaattagggcatagagcacagaaaaatcaagaccatgagaagacattttaccatttagctactttttataactaaatactctttaaatatttttatttcaatactgtggatggaaatgagaagcattctaaatttgagttaatatatttttatgaagatatttgagaaaagaaaaaaatagcttgtattcaggttcattggcttttgctggatgatccacctaaagaagttacctaatttggccttttaaaaaaggtgttagtgtttattatagctactttcaaggaaagtttgaatatgattctagtctctaaagttcttcacgttttctgacattccctggagggtgactggggaagaattgctccagggtagaagaaccaggcccaagactttaccattctgatctagagacaaaggatactcaatgaggagcttttttcccctcttggaacaggtaaaatgctttttcttattaatataattataaaacagtattttatgtaacagctattcccatattctaggagtggcctaagaaatgcgtgtttcagtgactagattataaatattctctattgtgaatagttgaataaaacagctgtttttttctgcttct

SEQ ID NO: 6157 - protein, 431 aa, Homo sapien [sequence omitted]

SEQ ID NO: 6158 - DNA, 1931 bp, Homo sapien; identical to SEQ ID NO: 4453

SEQ ID NO: 6159 - protein, 343 aa, Homo sapien; identical to SEQ ID NO: 4454

SEQ ID NO: 6160 - DNA, 1668 bp, Homo sapien
atggcagcccgtctgctcctcctgggcatccttctcctgctgctgcccctgcccgtccctgccccgtgccacacagccgcacgctcagagtgcaagcgcagccacaagttcgtgcctggtgcatggctggccggggagggtgtggacgtgaccagcctccgccgctcgggctccttcccagtggacacacaaaggttcctgcggcccgacggcacctgcaccctctgtgaaaatgccctacaggagggcaccctccagcgcctgcctctggcgctcaccaactggcgggcccagggctctggctgccagcgccatgtaaccagggccaaagtcagctccactgaagctgtggcccgggatgcggctcgtagcatccgcaacgactggaaggtcgggctggacgtgactcctaagcccaccagcaatgtgcatgtgtctgtggccggctcacactcacaggcagccaactttgcagcccagaagacccaccaggaccagtacagcttcagcactgacacggtggagtgccgcttctacagtttccatgtggtacacactcccccgctgcaccctgacttcaagagggccctcggggacctgccccaccacttcaacgcctccacccagcccgcctacctcaggcttatctccaactacggcacccacttcatccgggctgtggagctgggtggccgcatatcggccctcactgccctgcgcacctgcgagctggccctggaagggctcacggacaacgaggtggaggactgcctgactgtcgaggcccaggtcaacataggcatccacggcagcatctctgccgaagccaaggcctgtgaggagaagaagaagaagcacaagatgacggcctccttccaccaaacctaccgggagcgccactcggaagtggttggcggccatcacacctccattaacgacctgctgttcgggatccaggccgggcccgagcagtactcagcctgggtaaactccgtgcccggcagccctggcctggtggactacaccctggaacccctgcacgtgctgctggacagccaggacccgcggcgggaggcactgaggagggccctgagtcagtacctgacggacagggctcgctggagggactgcagccggccgtgcccaccagggcggcagaagagcccccgagacccatgccagtgtgtgtgccatggctcagcggtcaccacccaggactgctgccctcggcagaggggcctggcccagctggaggtgaccttcatccaagcatggagcctgtggggggactggttcactgccacggatgcctatgtgaagctcttctttggtggccaggagctgaggacgagcaccgtgtgggacaataacaaccccatctggtcagtgcggctggattttggggatgtgctcctggccacaggggggcccctgaggttgcaggtctgggatcaggactctggcagggacgatgacctccttggcacctgtgatcaggctcccaagtctggttcccatgaggtgagatgcaacctgaatcatggccacctaaaattccgctatcatgccaggtgcttgccccacctgggaggaggcacctgcctggactatgtcccccaaatgcttctgggggagcctccaggaaaccggagtggggccgtgtggtga

SEQ ID NO: 6161 - protein, 555 aa, Homo sapien
MAARLLLLGILLLLLPLPVPAPCHTAARSECKRSHKFVPGAWLAGEGVDVTSLRRSGSFPVDTQRFLRPDGTCTLCENALQEGTLQRLPLALTNWRAQGSGCQRHVTRAKVSSTEAVARDAARSIRNDWKVGLDVTPKPTSNVHVSVAGSHSQAANFAAQKTHQDQYSFSTDTVECRFYSFHVVHTPPLHPDFKRALGDLPHHFNASTQPAYLRLISNYGTHFIRAVELGGRISALTALRTCELALEGLTDNEVEDCLTVEAQVNIGIHGSISAEAKACEEKKKKHKMTASFHQTYRERHSEVVGGHHTSINDLLFGIQAGPEQYSAWVNSVPGSPGLVDYTLEPLHVLLDSQDPRREALRRALSQYLTDRARWRDCSRPCPPGRQKSPRDPCQCVCHGSAVTTQDCCPRQRGLAQLEVTFIQAWSLWGDWFTATDAYVKLFFGGQELRTSTVWDNNNPIWSVRLDFGDVLLATGGPLRLQVWDQDSGRDDDLLGTCDQAPKSGSHEVRCNLNHGHLKFRYHARCLPHLGGGTCLDYVPQMLLGEPPGNRSGAVW

SEQ ID NO: 6162 - DNA, 3297 bp, Homo sapien
cagggtctcccccactaaaccgtgcgggtgccaggggacgaaagaagtgcaaaagcgcgggcttggaggggatggcttgtgttaagttgctttgctcccatcagaatcgaggagacgtggcgcctgtggcagaagtttttagacgactattctcgctttgaggactggctcaagtcagctgagaggacggcagcctgcccaaattcctcagaggtgttgtacacgagtgccaaagaggaactgaagaggtttgaggcctttcagcggcagattcatgagcggctcactcagctggagctcatcaacaagcagtaccggcggctggcccgggagaaccgcacagacacggccagcaggctgaagcagatggtccacgagggcaaccagcgctgggacaaccttcagaggcgggtcacagccgtcctgcggagactcaggcatttcaccaaccagagggaagaatttgagggcaccagggagagcattctggtgtggctcacagagatggacctgcagctgaccaacgtggagcacttctcagagagtgacgccgatgacaagatgcgccaactgaatggcttccaacaggaaattacattaaataccaacaagattgatcagctcattgtgtttggggagcagctgattcagaagagcgagcccctggatgctgtgctgattgaggatgagctggaggaactccaccgctactgccaggaggtgtttggaagggtctcccggttccaccggcggctcacctcctgcactccgggcttggaagatgaaaaggaggcctctgagaatgaaacagacatggaagaccccagagaaatccagactgattcttggcgtaaacggggagagagcgaggaaccgtcatctcctcagtccctgtgtcatctagtggccccagggcacgagcggtctggctgcgagacccctgtcagcgtggactccatccccctggagtgggaccacacaggcgacgtggggggctcctcctctcacgaagaggacgaggagggcccatactacagcgcactgtcaggtaaatccatttcggatggccactcgtggcatgttcccgacagcccttcctgtcccgagcatcactacaagcaaatggaaggtgacaggaatgttccacctgttccccctgcgtccagcaccccttataaaccaccctatggaaagctactattacctccaggcacggatggtggcaaagaaggcccgcgagtcctgaatggcaacccacagcaggaagacgggggactggccggtatcacagagcagcagtcaggtgccttcgacagatgggagatgattcaagcacaggagcttcacaataagctcaaaataaaacaaaatttgcaacagctgaactctgatatcagcgccatcactacttggctgaaaaaaactgaagcagagctggaaatgttaaagatggcaaagcctccctctgatatccaggaaatagaactgagagtgaagagactgcaggagatactgaaagcctttgacacttacaaggcattagtggtctctgtcaacgtgagcagcaaggaatttctgcaaaccgagagccccgaatccacagagctccaaagtagactccgccagctgagcctgctctgggaagcagcacagggcgcagtggacagctggagagggggcttacgacagtcgctcatgcagtgccaggacttccaccagttgagtcaaaatctgctgctgtggttagcgagtgccaagaaccggaggcagaaggctcatgtcaccgatccaaaggcagacccccgggctctcctagagtgtcggagggaactaatgcaactggaaaaggagctggtagaacgtcaacctcaagtggacatgttacaggagatttcaaacagccttctcattaagggacatggagaagactgtattgaagctgaagaaaaggtgcatgttattgagaagaaactcaaacagttacgggagcaagtgtcccaagatttaatggccttgcagggaacccagaacccagcctcacccctgcccagcttcgacgaggtagactcgggggaccagcctcctgcaacatccgtgccagctccccgagcaaagcagttcagagcagtgagaactacagaaggcgaggaggagacagagagcagggtccccggcagcacacggccacagcgctccttcctctcaagggtggtccgggcagccctacccctgcagctgctcctcctgctgctgctgctcctggcctgcctgctgccctcctccgaagaagactacagctgcactcaggccaacaactttgcccggtccttttaccccatgctgaggtacaccaatgggccaccccccacatagagggcatagctggccacagtgctacaccacctgcctgattgccaagggtgcccagcacgtggccccagaccaatctgagtgacttagtgttggcaaggtcccgggacctgtgcagacttcttctgggcttacacagcacgggctccctggagcccagggcagctttcagattgtgttcctccccaggagcagggaacctgtgtggcaggtgccccgggtactttggcagaactagttgattagtttagggatctctggaaatgtcagtttcctgaagagccaagcactttgtgaattctggtttgtttgtaaaacagcattattataatgtaggtatggtcaatgagcagtggtgtccatcacatatattatagaagcaagcgagcacattccaccctagaaatggttcagaaactcataggcacccttagctgatggaaacaatcaatcatatttaatacgcttagaatcagttttactccaatcagctggcaattttgagctgccggttatacaccaaaatgttctgttcagtacctagctctgctcttttatattgctttaaatttttaaagaaattatattgcatggatgtggttatttgtgcatattttttaacaatgcccaatctgtatgaataatgtaaacttcgatttttttttaaaaaaattagattttagctggagcttttgactaatgtaaagtaaatgccaaactaccgacttgatagggatgtttttgtaagttaattttctaagactttttcacatccaaagtgatgctttgctttgggttttaactgtttggccacggcgggggtgggggcggggggttggtacagaaacttgaagctgtttgtgatatgtacaactcagatgtttctcattaaaaaacaaaattagccagaaaaaaaaaaaaaaaaaa

SEQ ID NO: 6163 - protein, 668 aa, Homo sapien
MVHEGNQRWDNLQRRVTAVLRRLRHFTNQREEFEGTRESILVWLTEMDLQLTNVEHFSESDADDKMRQLNGFQQEITLNTNKIDQLIVFGEQLIQKSEPLDAVLIEDELEELHRYCQEVFGRVSRFHRRLTSCTPGLEDEKEASENETDMEDPREIQTDSWRKRGESEEPSSPQSLCHLVAPGHERSGCETPVSVDSIPLEWDHTGDVGGSSSHEEDEEGPYYSALSGKSISDGHSWHVPDSPSCPEHHYKQMEGDRNVPPVPPASSTPYKPPYGKLLLPPGTDGGKEGPRVLNGNPQQEDGGLAGITEQQSGAFDRWEMIQAQELHNKLKIKQNLQQLNSDISAITTWLKKTEAELEMLKMAKPPSDIQEIELRVKRLQEILKAFDTYKALVVSVNVSSKEFLQTESPESTELQSRLRQLSLLWEAAQGAVDSWRGGLRQSLMQCQDFHQLSQNLLLWLASAKNRRQKAHVTDPKADPRALLECRRELMQLEKELVERQPQVDMLQEISNSLLIKGHGEDCIEAEEKVHVIEKKLKQLREQVSQDLMALQGTQNPASPLPSFDEVDSGDQPPATSVPAPRAKQFRAVRTTEGEEETESRVPGSTRPQRSFLSRVVRAALPLQLLLLLLLLLACLLPSSEEDYSCTQANNFARSFYPMLRYTNGPPPT

SEQ ID NO: 6164 - DNA, 983 bp, Homo sapien; identical to SEQ ID NO: 1181

SEQ ID NO: 6165 - protein, 181 aa, Homo sapien; identical to SEQ ID NO: 1182

SEQ ID NO: 6166 - DNA, 1247 bp, Homo sapien; identical to SEQ ID NO: 1589

SEQ ID NO: 6167 - protein, 326 aa, Homo sapien; identical to SEQ ID NO: 1590

SEQ ID NO: 6168 - DNA, 627 bp, Homo sapien; identical to SEQ ID NO: 1081

SEQ ID NO: 6169 - protein, 79 aa, Homo sapien; identical to SEQ ID NO: 1082

SEQ ID NO: 6170 - DNA, 4004 bp, Homo sapien
agcggagtgcagggatgtgcagatgagtgggctgtggggtgtcctgctcacggtttcatggatgaatggcttattcagaagagcataaaggtatgccctgtggtttcatccgccagaattccggcaactccatttccttggactttgagcccagtatagagtaccagtttgtggagcggttggaagagcgctacaaatgtgccttctgccactcggtgcttcacaacccccaccagacaggatgtgggcaccgcttctgccagcactgcatcctgtccctgagagaattaaacacagtgccaatctgccctgtagataaagaggtcatcaaatctcaggaggtttttaaagacaattgttgcaaaagagaagtcctcaacttatatgtatattgcagcaatgctcctggatgtaatgccaaggttattctgggccggtaccaggatcaccttcagcagtgcttatttcaacctgtgcagtgttctaatgagaagtgccgggagccagtcctacggaaagacctgaaagagcatttgagtgcatcctgtcagtttcgaaaggaaaaatgcctttattgcaaaaaggatgtggtagtcatcaatctacagaatcatgaggaaaacttgtgtcctgaatacccagtattttgtcccaacaattgtgcgaagattattctaaaaactgaggtagatgaacacctggctgtatgtcctgaagctgagcaagactgtccttttaagcactatggctgtgctgtaacggataaacggaggaacctgcagcaacatgagcattcagccttacgggagcacatgcgtttggttttagaaaagaatgtccaattagaagaacagatttctgacttacacaagagcctagaacagaaagaaagtaaaatccagcagctagcagaaactataaagaaacttgaaaaggagttcaagcagtttgcacagttgtttggcaaaaatggaagcttcctcccaaacatccaggtttttgccagtcacattgacaagtcagcttggctagaagctcaagtgcatcaattattacaaatggttaaccagcaacaaaataaatttgacctgagacctttgatggaagcagttgatacagtgaaacagaaaattaccctgctagaaaacaatgatcaaagattagccgttttagaagaggaaactaacaaacatgatacccacattaatattcataaagcacagctgagtaaaaatgaagagcgatttaaactgctggagggtacttgctataatggaaagctcatttggaaggtgacagattacaagatgaagaagagagaggcggtggatgggcacacagtgtccatcttcagccagtccttctacaccagccgctgtggctaccggctctgtgctagagcatacctgaatggggatgggtcagggagggggtcacacctgtccctatactttgtggtcatgcgaggagagtttgactcactgttgcagtggccattcaggcagagggtgaccctgatgcttctggaccagagtggcaaaaagaacattatggagaccttcaaacctgaccccaatagcagcagctttaaaagacctgatggggagatgaacattgcatctggctgtccccgctttgtggctcattctgttttggagaatgccaagaacgcctacattaaagatgacactctgttcttgaaagtggccgtggacttaactgacctggaggatctctagtcactgttatggggtgataagaggacttcttggggccagaactgtggaggagagcacatttgattatcatattgacctggatttagactcaaagcacatttgtatttgcctttttccttaacgtttgaagtcagtttaaaacttctgaagtgctgtctttttacattttactctgtcccagtttgaaacttaaaactcttagaatattctcttattatttatatttttatatttcttgaaagatggtaagtttcttgaagtttttggggcgtttctcttttactggtgcttagcgcagtgtctcgggcactctaaatattgagtgttatggaggacacagaggtagcagaatcccagttgaaaatgttttgatattttattgtttggcctattgattctagacctggccttaagtctgcaaaagccatctttataaggtaggctgttccagttaagaagtgggtgatgtagttacaaagataatatgctcagtttggacctttttttcagttaaatgctaaatatatgaaaattactatacctctaagtattttcatgaaattcaccagcagtttgcaagcacagttttgcaaggctgcataagaactggtgaatggggtaagcattttcattcttcctgctgaagtaaagcagaaagtactgcatagtatatgagatatagccagctagctaaagttcagattttgttaggttcaaccctatgaaaaaaactattttcataggtcaaaaatggtaaaaaattagcagtttcataagattcaaccaaataaatatatatatacacacacacatacatatacacctatatatgtgtgtatacaaacagttcgaatgtattttggtgacagtaataaatcaatgtgaggatggatagaatttagtatatgatagagaaaatgtcataaatggataaaaggaatttacaacttgaggagaaaacctttacaatttcctatgggtgtcagaagtactctcagcgaaaactgatggctaaaacagtatctactattctctgataactttttttttgagacagagtttcattgtcacccaggctggagtacagtggcatgatctcagctcactgcaaactctgcctcccgaattcaagtgattctcctgcctcagcctcctgagtagctgggattacaggcgcccgtcaccacacccaggtaatttttgtatttttagtagagacggagttttgccatgttggccaagctgatctcaaactcctgacctcaagtgatctgcccgcctcggcctcccaaagtgctgagattacaggcatgacccaccgcgtcaagcctctgacaactattgaatttgtaagctgctatgcaaatgggcatttatataaacttgtgatgtttcttgtcagaattctgagtactctgtgaagaacagaaatgatcatattcttatgcatctatctgtatgggtctgaaggtgtatatacaaactgagatgagtccttatgactcttgataagcctgagtttaacaacaacaaaaatgccaagttgtcctgagcccttctgcgttgttatgccacttccctactgctcatatgcacgctggctcccctgggcacgcaaggatgagtatgggccatgggcccctgtagagctgcttacctggtgatgaccatgcaccttacaatttctgaacagttaaccctatagaagcatgctttatatgagtgtcttctgggaagaggaaccttcttaatctcttctgtgggattttcaaaatgctaaagactcacactgcagcaatcatcccagatgattaaattcaaagaaataggttcacaacaggaatatactgaagaactagagtgtcactgctggtgaactgtggcacggttgctcaacacatcacctcggacaaattcaggaagcatttctttagcccacaagtccagacccaggtgctctgtatgtttgtttttaatattcatcatatccaagttcactctgtcttcctgagcagtggaagatcatattgctgtaacttcttttaagtagttgatgtggaaaacattttaaagtgaatttgtcaaaatgctggttttgtgttttatccaacttttgtgcatatatataaagtatgtcatggcatggtttgcttaggagttcagagttccttcatcatcgaaatagtgattaagtgatcccagaacaaggaatactagagtaaaaagcacctctttttcacaaaaaaaaaaaaaaaaaaaaaaaaa

SEQ ID NO: 6171 - protein, 557 aa, Homo sapien
MAYSEEHKGMPCGFIRQNSGNSISLDFEPSIEYQFVERLEERYKCAFCHSVLHNPHQTGCGHRFCQHCILSLRELNTVPICPVDKEVIKSQEVFKDNCCKREVLNLYVYCSNAPGCNAKVILGRYQDHLQQCLFQPVQCSNEKCREPVLRKDLKEHLSASCQFRKEKCLYCKKDVVVINLQNHEENLCPEYPVFCPNNCAKIILKTEVDEHLAVCPEAEQDCPFKHYGCAVTDKRRNLQQHEHSALREHMRLVLEKNVQLEEQISDLHKSLEQKESKIQQLAETIKKLEKEFKQFAQLFGKNGSFLPNIQVFASHIDKSAWLEAQVHQLLQMVNQQQNKFDLRPLMEAVDTVKQKITLLENNDQRLAVLEEETNKHDTHINIHKAQLSKNEERFKLLEGTCYNGKLIWKVTDYKMKKREAVDGHTVSIFSQSFYTSRCGYRLCARAYLNGDGSGRGSHLSLYFVVMRGEFDSLLQWPFRQRVTLMLLDQSGKKNIMETFKPDPNSSSFKRPDGEMNIASGCPRFVAHSVLENAKNAYIKDDTLFLKVAVDLTDLEDL

SEQ ID NO: 6172 - DNA, 2251 bp, Homo sapien; identical to SEQ ID NO: 1519

SEQ ID NO: 6173 - protein, 443 aa, Homo sapien; identical to SEQ ID NO: 1520

SEQ ID NO: 6174 - DNA, 664 bp, Homo sapien; identical to SEQ ID NO: 1113

SEQ ID NO: 6175 - protein, 167 aa, Homo sapien; identical to SEQ ID NO: 1114

SEQ ID NO: 6176 - DNA, 417 bp, Homo sapien
atggcaaagcaaccttctgatgtaagttctgagtgtgaccgagaaggtagacaattgcagcctgcggagaggcctccccagctcagacctggggcccctacctccctacagacagagccacaagacaggagcccagcacccatgagttgtgacaaatcaacacaaaccccaagtcctccttgccaggccttcaaccactatctcagtgcaatggcttccatgaggcaggctgaacctgcagatatgcgcccagagatatggatcgcccaagagttgcggcgtatcggagacgagtttaacgcttactatgcaaggagggtatttttgaataattaccaagcagccgaagaccacccacgaatggttatcttacgactgttacgttacattgtccgcctggtgtggagaatgcattga

SEQ ID NO: 6177 - protein, 138 aa, Homo sapien; identical to SEQ ID NO: 4212

SEQ ID NO: 6178 - DNA, 670 bp, Homo sapien
ggcacgagctcatctgacgactgacagctgatggcaccgccagcctctgtcccttggccaggactgtcacacggctgactctcagcaggggcagtagaatgaaagagggcatgtctaataacagcaccactagcatctcccaagccaggaaagctgtggagcagctaaagatggaagcctgtatggacagggtcaaggtctcccaggcagccgcggacctcctggcctactgtgaagctcacgtgcgggaagatcctctcatcattccagtgcctgcatcagaaaacccctttcgcgagaagaagttcttttgtaccattctctaactccgtgtgtgatgaaaacgcctccttttctgaccttcaaagtcccctgtagagaccatgcatgctctaagccttagggagtgagaccaacacccatccctgcccagccaacagtggccggggcttgtcttatgtttccatctgttttcttcgtggcattcaatttcatttttttccttttcattttcatgttattttcattattggcaaagaaaatcaaaatgtttatagccaaataacaaatgtgccatgtaaaagtaagtctggacttaagagtttaaaatttttaaacatcagtttccaagtttatatcatattaatacatttcagtggataatttattt

SEQ ID NO: 6179 - protein, 75 aa, Homo sapien; identical to SEQ ID NO: 1308

SEQ ID NO: 6180 - DNA, 3164 bp, Homo sapien
cggcctcagaaagccgagtgaggagttggccgtagtgagagggaccgatcccttggggccgccggcggcgaggccgagccgctcctcccaatggcgaagaagacgtacgacctgcttttcaagctgctcctgatcggggattccggagtggggaagacctgcgtcctttttcgtttttcggatgatgccttcaatactacctttatttccaccataggaatagacttcaagatcaaaacagttgaattacaaggaaagaagatcaagctacagatatgggatacagcaggccaggagcgatttcacaccatcacaacctcctactacagaggcgcaatgggtatcatgctagtatatgacatcaccaatggtaaaagttttgaaaacatcagcaaatggcttagaaacatagatgagcatgccaatgaagatgtggaaagaatgttactaggaaacaagtgtgatatggacgacaaaagagttgtacctaaaggaaaaggagaacagattgcaagggagcatggtattaggttttttgagactagtgcaaaagcaaatataaacatcgaaaaggcgttcctcacgttagctgaagatatccttcgaaagacccctgtaaaagagcccaacagtgaaaatgtagatatcagcagtggaggaggcgtgacaggctggaagagcaaatgctgctgagcattctcctgttccatcagttgccatccactaccccgttttctcttcttgctgcaaaataaaccactctgtccatttttaactctaaacagatatttttgtttctcatcttaactatccaagccacctattttatttgttctttcatctgtgactgcttgctgactttatcataattttcttcaaacaaaaaaatgtatagaaaaatcatgtctgtgacttcatttttaaatgtacttgctcagctcaactgcatttcagttgtattatagtccagttcttatcaacattaaaacctatagcaatcatttcaaatctattctgcaaattgtataagaataaagttagaattaacaattttattttgtacaacagtggaattttctgtcatggataatgtgcttgagtccctataatctatagacatgtgatagcaaaagaaacaaacaaaagccaggaaaacactcattttcgccttgaatatgtaaatgggattaattttgtcctgtgccttatgtggaaagggacttctttgggttttccttttttgttctggtggaagcatgtgcagggagaccatatcatccaaaccataaacccattaaaatgtttgtggtttgcttggctgtaattttcaaagtagttaattgaggacaaagggtaatgcagaagtgatagctttggtttgctgagtcttgttttaagtggccttgatatttaaaactattcctgccaccatttcttctccttggccacttcttccttgcgtctccctgcatgctgctttatttgcttctccctccccaaccacctcatggtatatttaagagtgaaagggacaaactagtaggtttgtcaagtttaatataaagcactgatgtaacttgctaggtaaacggaaagataagttctaactgcctactatccaatgtcagttaattggtgtcttcccccctcatttgctctcttccctaaaatgtgtcccagatgccttcatttgctgttttacttctatgttctgcttttcctcctctctttgttcccttcctgtctatccattgagtttatgaaatggaagagttaactgcatgcactagtgtttggagggtgttgtggtttgtctttctaattaggtgtatagcctattcactttcctaggaataaatctcttaacctaaatttgagtagtctgcattttggcaactcctctaagcagcttggtagcctaagtacaggttgtttttttaaaaaaggaaaagcaggaaggaggagtgaattttattaacatgtttgccaaatgtattgagatttggcctctgaagaacactttttcagtgttaagtttctttaccttaagattccgaaatactttagaatattattaattttaagtcctgtctttacatccttttggaaaacttgtattaccatgagtttggaaaaaggacaacgaaaggcttttcatgtaaagataagatctttagctatctctaaccctgtccttttttcactgcattttttctagttttgcttcattgcttatcattaggatagggtaagtgaagtttgctatgctgctagcatcctaagatgatacctttgttgaaagaattgtgaatagcatgattcatttctagcagaggctgagtttaggacagcagcttccattgagaagtctttctgtgtcgtgaatagcattttaatgacctcttggctcacataagcaaacaacatagggacgtatctgctatgaaaatccacaaatttttcagatagtgccctaaaaacaattttatatgcctcactggttgttattcttaggttattcccacacttgactttatcattgtttactactagtaaaaagcagcattgccaaataatccctaattttccactaaaaatataatgaaatgatgttaagctttttgaaaagtttaggttaaacctactgttgttagattaatgtatttgttgcttccctttatctggaatgtggcattagcttttttattttaaccctctttaattcttattcaattccatgacttaaggttggagagctaaacactgggatttttggataacagactgacagttttgcataattataatcggcattgtacatagaaaggatatggctaccttttgttaaatctgcactttctaaatatcaaaaaagggaaatgaagtataaatcaatttttgtataatctgtttgaaacatgagttttatttgcttaatattagctttgccccttttctgtaagtctcttgggatcctgtgtagaagctgttctcattaaacaccaaacagttaagtccattctctggtactagctacaaattcggtttcatattctacttaacaatttaaataaactgaaatatttctagatggtctacttctgttcatataaaaacaaaacttgatttccaaaaaaaaaaaaaaaaaaaaaaaaaaaaaaaaa

SEQ ID NO: 6181 - protein, 200 aa, Homo sapien
MAKKTYDLLFKLLLIGDSGVGKTCVLFRFSDDAFNTTFISTIGIDFKIKTVELQGKKIKLQIWDTAGQERFHTITTSYYRGAMGIMLVYDITNGKSFENISKWLRNIDEHANEDVERMLLGNKCDMDDKRVVPKGKGEQIAREHGIRFFETSAKANINIEKAFLTLAEDILRKTPVKEPNSENVDISSGGGVTGWKSKCC

SEQ ID NO: 6182 - DNA, 3434 bp, Homo sapien; identical to SEQ ID NO: 3369

SEQ ID NO: 6183 - protein, 1025 aa, Homo sapien
MSNGYSTDENFRYLISCFRARVKMYIQVEPVLDYLTFLPAEVKEQIQRTVATSGNMQAVELLLSTLEKGVWHLGWTREFVEALRRTGSPLAARYMNPELTDLPSPSFENAHDEYLQLLNLLQPTLVDKLLVRDVLDKCMEEELLTIEDRNRIAAAENNGNESGVRELLKRIVQKENWFSAFLNVLRQTGNNELVQELTGSDCSESNAEIENLSQVDGPQVEEQLLSTTVQPNLEKEVWGMENNSSESSFADSSVVSESDTSLAEGSVSCLDESLGHNSNMGSDSGTMGSDSDEENVAARASPEPELQLRPYQMEVAQPALEGKNIIICLPTGSGKTRVAVYIAKDHLDKKKKASEPGKVIVLVNKVLLVEQLFRKEFQPFLKKWYRVIGLSGDTQLKISFPEVVKSCDIIISTAQILENSLLNLENGEDAGVQLSDFSLIIIDECHHTNKEAVYNNIMRHYLMQKLKNNRLKKENKPVIPLPQILGLTASPGVGGATKQAKAEEHILKLCANLDAFTIKTVKENLDQLKNQIQEPCKKFAIADATREDPFKEKLLEIMTRIQTYCQMSPMSDFGTQPYEQWAIQMEKKAAKEGNRKERVCAEHLRKYNEALQINDTIRMIDAYTHLETFYNEEKDKKFAVIEDDSDEGGDDEYCDGDEDEDDLKKPLKLDETDRFLMTLFFENNKMLKRLAENPEYENEKLTKLRNTIMEQYTRTEESARGIIFTKTRQSAYALSQWITENEKFAEVGVKAHHLIGAGHSSEFKPMTQNEQKEVISKFRTGKINLLIATTVAEEGLDIKECNIVIRYGLVTNEIAMVQARGRARADESTYVLVAHSGSGVIEHETVNDFREKMMYKAIHCVQNMKPEEYAHKILELQMQSIMEKKMKTKRNIAKHYKNNPSLITFLCKNCSVLACSGEDIHVIEKMHHVNMTPEFKELYIVRENKALQKKCADYQINGEIICKCGQAWGTMMVHKGLDLPCLKIRNFVVVFKNNSTKKQYKKWVELPITFPNLDYSECCLFSDED

SEQ ID NO: 6184 - DNA, 4193 bp, Homo sapien; identical to SEQ ID NO: 1587

SEQ ID NO: 6185 - protein, 721 aa, Homo sapien; identical to SEQ ID NO: 1588

SEQ ID NO: 6186 - DNA, 3237 bp, Homo sapien
gcgaagtgaagggtggcccaggtggggccaggctgactgaatgtatctcctagctatggactaaataatacatggggggaaataaacaagtattcatgagggtgaaaatgtgacccagcaggaaaattacaactattttcaattgacgttgaataggatgagtcatggaatttaagtgatttactgaagattatactactggtagatagaagagctaaagaaagatggatactatgatgctgaatgtgcggaatctgtttgagcagcttgtgcgccgggtggagattctcagtgaaggaaatgaagtccaatttatccagttggcgaaggactttgaggatttccgtaaaaagtggcagaggactgaccatgagctggggaaatacaaggatcttttgatgaaagcagagactgagcgaagtgctctggatgttaagctgaagcatgcacgtaatcaggtggatgtagagatcaaacggagacagagagctgaggctgactgcgaaaagctggaacgacagattcagctgattcgagagatgctcatgtgtgacacatctggcagcattcaactaagcgaggagcaaaaatcagctctggcttttctcaacagaggccaaccatccagcagcaatgctgggaacaaaagactatcaaccattgatgaatctggttccattttatcagatatcagctttgacaagactgatgaatcactggattgggactcttctttggtgaagactttcaaactgaagaagagagaaaagaggcgctctactagccgacagtttgttgatggtccccctggacctgtaaagaaaactcgttccattggctctgcagtagaccaggggaatgaatccatagttgcaaaaactacagtgactgttcccaatgatggcgggcccatcgaagctgtgtccactattgagactgtgccatattggaccaggagccgaaggaaaacaggtactttacaaccttggaacagtgactccaccctgaacagcaggcagctggagccaagaactgagacagacagtgtgggcacgccacagagtaatggagggatgcgcctgcatgactttgtttctaagacggttattaaacctgaatcctgtgttccatgtggaaagcggataaaatttggcaaattatctctgaagtgtcgagactgtcgtgtggtctctcatccagaatgtcgggaccgctgtccccttccctgcattcctaccctgataggaacacctgtcaagattggagagggaatgctggcagactttgtgtcccagacttctccaatgatcccctccattgttgtgcattgtgtaaatgagattgagcaaagaggtctgactgagacaggcctgtataggatctctggctgtgaccgcacagtaaaagagctgaaagagaaattcctcagagtgaaaactgtacccctcctcagcaaagtggatgatatccatgctatctgtagccttctaaaagactttcttcgaaacctcaaagaacctcttctgacctttcgccttaacagagcctttatggaagcagcagaaatcacagatgaagacaacagcatagctgccatgtaccaagctgttggtgaactgccccaggccaacagggacacattagctttcctcatgattcacttgcagagagtggctcagagtccacatactaaaatggatgttgccaatctggctaaagtctttggccctacaatagtggcccatgctgtgcccaatccagacccagtgacaatgttacaggacatcaagcgtcaacccaaggtggttgagcgcctgctttccttgcctctggagtattggagtcagttcatgatggtggagcaagagaacattgaccccctacatgtcattgaaaactcaaatgccttttcaacaccacagacaccagatattaaagtgagtttactgggacctgtgaccactcctgaacatcagcttctcaagactccttcatctagttccctgtcacagagagtccgttccaccctcaccaagaacactcctagatttgggagcaaaagcaagtctgccactaacctaggacgacaaggcaacttttttgcttctccaatgctcaagtgaagtcacatctgcctgttacttcccagcattgactgactataagaaaggacacatctgtactctgctctgcagcctcctgtactcattactacttttagcattctccaggcttttactcaagtttaattgtgcatgagggttttattaaaactatatatatctccccttccttctcctcaagtcacataatatcagcactttgtgctggtcattgttgggagcttttagatgagacatctttccaggggtagaagggttagtatggaattggttgtgattctttttggggaagggggttattgttcctttggcttaaagccaaatgctgctcatagaatgatctttctctagtttcatttagaactgatttccgtgagacaatgacagaaaccctacctatctgataagattagcttgtctcagggtgggaagtgggagggcagggcaaagaaaggattagaccagaggatttaggatgcctccttctaagaaccagaagttctcattccccattatgaactgagctataatatggagctttcataaaaatgggatgcattgaggacagaactagtgatgggagtatgcgtagctttgatttggatgattaggtctttaatagtgttgagtggcacaaccttgtaaatgtgaaagtacaactcgtatttatctctgatgtgccgctggctgaactttgggttcatttggggtcaaagccagtttttcttttaaaattgaattcattctgatgcttggcccccatacccccaaccttgtccagtggagcccaacttctaaaggtcaatatatcatcctttggcatcccaactaacaataaagagtaggctataagggaagattgtcaatattttgtggtaagaaaagctacagtcattttttctttgcactttggatgctgaaatttttcccatggaacatagccacatctagatagatgtgagctttttcttctgttaaaattattcttaatgtctgtaaaaacgattttcttctgtagaatgtttgacttcgtattgacccttatctgtaaaacacctatttgggataatatttggaaaaaaagtaaatagctttttcaaaatgaaaaaaaaaa

SEQ ID NO: 6187 - protein, 632 aa, Homo sapien
MDTMMLNVRNLFEQLVRRVEILSEGNEVQFIQLAKDFEDFRKKWQRTDHELGKYKDLLMKAETERSALDVKLKHARNQVDVEIKRRQRAEADCEKLERQIQLIREMLMCDTSGSIQLSEEQKSALAFLNRGQPSSSNAGNKRLSTIDESGSILSDISFDKTDESLDWDSSLVKTFKLKKREKRRSTSRQFVDGPPGPVKKTRSIGSAVDQGNESIVAKTTVTVPNDGGPIEAVSTIETVPYWTRSRRKTGTLQPWNSDSTLNSRQLEPRTETDSVGTPQSNGGMRLHDFVSKTVIKPESCVPCGKRIKFGKLSLKCRDCRVVSHPECRDRCPLPCIPTLIGTPVKIGEGMLADFVSQTSPMIPSIVVHCVNEIEQRGLTETGLYRISGCDRTVKELKEKFLRVKTVPLLSKVDDIHAICSLLKDFLRNLKEPLLTFRLNRAFMEAAEITDEDNSIAAMYQAVGELPQANRDTLAFLMIHLQRVAQSPHTKMDVANLAKVFGPTIVAHAVPNPDPVTMLQDIKRQPKVVERLLSLPLEYWSQFMMVEQENIDPLHVIENSNAFSTPQTPDIKVSLLGPVTTPEHQLLKTPSSSSLSQRVRSTLTKNTPRFGSKSKSATNLGRQGNFFASPMLK

SEQ ID NO: 6188 - DNA, 2425 bp, Homo sapien; identical to SEQ ID NO: 1557

SEQ ID NO: 6189 - protein, 393 aa, Homo sapien; identical to SEQ ID NO: 1558

SEQ ID NO: 6190 - DNA, 1677 bp, Homo sapien
cgggggttttgatcttcttccccttcttttcttccccttcttctttccttcctccctccctctctcatttcccttctccttctccctcagtctccacattcaacattgacaagtccattcagaaaagcaagctgcttctggttgggcccagacctgccttgaggagcctgtagagttaaaaaatgaaccccacggatatagcagataccaccctcgatgaaagcatatacagcaattactatctgtatgaaagtatccccaagccttgcaccaaagaaggcatcaaggcatttggggagctcttcctgcccccactgtattccttggtttttgtatttggtctgcttggaaattctgtggtggttctggtcctgttcaaatacaagcggctcaggtccatgactgatgtgtacctgctcaaccttgccatctcggatctgctcttcgtgttttccctccctttttggggctactatgcagcagaccagtgggtttttgggctaggtctgtgcaagatgatttcctggatgtacttggtgggcttttacagtggcatattctttgtcatgctcatgagcattgatagatacctggcgatagtgcacgcggtgttttccttgagggcaaggaccttgacttatggggtcatcaccagtttggctacatggtcagtggctgtgttcgcctcccttcctggctttctgttcagcacttgttatactgagcgcaaccatacctactgcaaaaccaagtactctctcaactccacgacgtggaaggttctcagctccctggaaatcaacattctcggattggtgatccccttagggatcatgctgttttgctactccatgatcatcaggaccttgcagcattgtaaaaatgagaagaagaacaaggcggtgaagatgatctttgccgtggtggtcctcttccttgggttctggacaccttacaacatagtgctcttcctagagaccctggtggagctagaagtccttcaggactgcacctttgaaagatacttggactatgccatccaggccacagaaactctggcttttgttcactgctgccttaatcccatcatctacttttttctgggggagaaatttcgcaagtacatcctacagctcttcaaaacctgcaggggcctttttgtgctctgccaatactgtgggctcctccaaatttactctgctgacacccccagctcatcttacacgcagtccaccatggatcatgatcttcatgatgctctgtaggaaaaatgaaatggtgaaatgcagagtcaatgaacttttccacattcagagcttactttaaaattggtatttttaggtaagagatccctgagccagtgtcaggaggaaggcttacacccacagtggaaagacagcttctcatcctgcaggcagctttttctctcccactagacaagtccagcctggcaagggttcacctgggctgaggcatccttcctcacaccaggcttgcctgcaggcatgagtcagtctgatgagaactctgagcagtgcttgaatgaagttgtaggtaatattgcaaggcaaagactattcccttctaacctgaactgatgggtttctccagagggaattgcagagtactggctgatggagtaaatcgctaccttttgctgtggcaaatgggcccccg

SEQ ID NO: 6191 - protein, 360 aa, Homo sapien
MNPTDIADTTLDESIYSNYYLYESIPKPCTKEGIKAFGELFLPPLYSLVFVFGLLGNSVVVLVLFKYKRLRSMTDVYLLNLAISDLLFVFSLPFWGYYAADQWVFGLGLCKMISWMYLVGFYSGIFFVMLMSIDRYLAIVHAVFSLRARTLTYGVITSLATWSVAVFASLPGFLFSTCYTERNHTYCKTKYSLNSTTWKVLSSLEINILGLVIPLGIMLFCYSMIIRTLQHCKNEKKNKAVKMIFAVVVLFLGFWTPYNIVLFLETLVELEVLQDCTFERYLDYAIQATETLAFVHCCLNPIIYFFLGEKFRKYILQLFKTCRGLFVLCQYCGLLQIYSADTPSSSYTQSTMDHDLHDAL

SEQ ID NO: 6192 - DNA, 1083 bp, Homo sapien; identical to SEQ ID NO: 1775

SEQ ID NO: 6193 - protein, 360 aa, Homo sapien; identical to SEQ ID NO: 1776

SEQ ID NO: 6194 - DNA, 1026 bp, Homo sapien; identical to SEQ ID NO: 3447

SEQ ID NO: 6195 - protein, 288 aa, Homo sapien; identical to SEQ ID NO: 3448

SEQ ID NO: 6196 - DNA, 2362 bp, Homo sapien
ggaattccaaaaaaaaaaaatacgactacacctgctccggagcccgcggcggtacctgcagcggaggagctctgtcttccccttcatctcacgcgagcccggcgtcccgccgcgtgcgccccggcgcagcccgccagtccgcccggagcccgcccagtcgccgcgctgcacgcccggggtgaaccctctgccctcgctgggacagagggccccgcagccgtcatgctttccgccatctacacagtcctggcgggactgctgttcctgccgctcctggtgaacctctgctgcccatacttcttccaggacataggctacttcttgaaggtggccgccgtgggccggagggtgcgcagctacgggcagcggcggccggcgcgcaccatcctgcgggcgttcctggagaaagcgcgccagacgccacacaagccttttctgctcttccgcgacgagactctcacctacgcgcaggtggaccggcgcagcaatcaagtggcccgggcgctgcacgaccacctcggcctgcgccagggagactgcgtggcgctccttatgggtaacgagccggcctacgtgtggctgtggctggggctggtgaagctgggctgtgccatggcgtgcctcaattacaacatccgcgcgaagtccctgctgcactgcttccagtgctgcggggcgaaggtgctgctggtgtcgccagaactacaagcagctgtcgaagagatactgccaagccttaaaaaagatgatgtgtccatctattatgtgagcagaacttctaacacagatgggattgactctttcctggacaaagtggatgaagtatcaactgaacctatcccagagtcatggaggtctgaagtcactttttccactcctgccttatacatttatacttctggaaccacaggtcttccaaaagcagccatgatcactcatcagcgcatatggtatggaactggcctcacttttgtaagcggattgaaggcagatgatgtcatctatatcactctgcccttttaccacagtgctgcactactgattggcattcacggatgtattgtggctggtgctactcttgccttgcggactaaattttcagccagccagttttgggatgactgcagaaaatacaacgtcactgtcattcagtatatcggtgaactgcttcggtatttatgcaactcaccacagaaaccaaatgaccgtgatcataaagtgagactggcactgggaaatggcttacgaggagatgtgtggagacaatttgtcaagagatttggggacatatgcatctatgagttctatgctgccactgaaggcaatattggatttatgaattatgcgagaaaagttggtgctgttggaagagtaaactacctacagaaaaaaatcataacttatgacctgattaaatatgatgtggagaaagatgaacctgtccgagatgaaaatggatattgcgtcagagttcccaaaggtgaagttggacttctggtttgcaaaatcacacaacttacaccatttaatggctatgctggagcaaaggctcagacagagaagaaaaaactgagagatgtctttaagaaaggagacctctatttcaacagtggagatctcttaatggttgaccatgaaaatttcatctatttccacgacagagttggagatacattccggtggaaaggggaaaatgtggccaccactgaagttgctgatacagttggactggttgattttgtccaagaagtaaatgtttatggagtgcatgtgccagatcatgagggtcgcattggcatggcctccatcaaaatgaaagaaaaccatgaatttgatggaaagaaactctttcagcacattgctgattacctacctagttatgcaaggccccggtttctaagaatacaggacaccattgagatcactggaacttttaaacaccgcaaaatgaccctggtggaggagggctttaaccctgctgtcatcaaagatgccttgtatttcttggatgacacagcaaaaatgtatgtgcctatgactgaggacatctataatgccataagtgctaaaaccctgaaactctgaatattcccaggaggataactcaacatttccagaaagaaactgaatggacagccacttgatataatccaactttaatttgattgaagattgtgaggaaattttgtaggaaatttgcatacccgtaaagggagacttttttaaataacagttgagtctttgcaagtaaaaagatttagagattattatttttcagtgtgcacctactgtttgtatttgcaaactgagcttgttggagggaaggcattattttttaaaatacttagtaaattaaatgaac

SEQ ID NO: 6197 - protein, 620 aa, Homo sapien; identical to SEQ ID NO: 1424

SEQ ID NO: 6198 - DNA, 2220 bp, Homo sapien
gtgaccggagcgagaaaccccgcctcggcaccctgacgcagcgcaggacccaccccgtgcgtgacgccagcgtcaggccagccccggcatgctctgcggccgcccgcggtccagctccgacaacaggaattttctccgagagcgggccgggctcagttcagctgctgtccagacccggatcggcaacagtgccgcctccagacgttctcctgccgctcgcccgcccgtcccagcgcccccagccctcccgcgagggcgccccgggacggaaggatccaccagtctgtcggcgcccgccgttctcgtggtcgccgtcgccgtcgtcgtggtggtagtctccgccgtcgcctgggccatggccaattacatccacgtccctcccggctccccggaggtgcccaagctgaacgtcaccgttcaggatcaggaggagcatcgctgccgggagggggccctgagcctcctgcaacacctgcggcctcactgggacccccaggaggtgaccctgcagctcttcacagatggaatcacaaataaacttattggctgttacgtgggaaacaccatggaggatgtagtcctggtgagaatttatggcaataagactgagttattagtcgatcgagatgaggaagtaaagagttttcgagtgttgcaggctcatgggtgtgcaccacaactctactgtaccttcaataatggactatgctatgaatttatacaaggagaagcactggatccaaagcatgtctgcaacccagccattttcaggctaatagctcgtcagcttgctaaaatccatgctattcatgcacacaatggctggatccccaaatctaatctttggctaaagatgggaaagtatttctctctcattcccacaggatttgcagatgaagacattaataaaaggttcctaagtgatatcccaagctctcagattctccaggaagagatgacttggatgaaggagattctttccaacctgggctcacctgttgtgctttgccataatgacctattgtgtaagaatataatctacaatgagaaacaaggtgatgtacagttcattgattatgaatattctggatacaactacctggcatatgatattggaaatcatttcaatgaatttgcaggtgtgagtgatgtagactatagtctgtatccagatagagaactacagagtcagtggctgcgtgcttaccttgaagcctacaaagaatttaagggctttgggactgaagttactgaaaaggaggtagaaatactcttcattcaagtcaatcagtttgcattggcttctcatttcttttggggattgtgggctttgattcaagccaaatactccactattgagtttgatttccttgggtatgcaattgttcgttttaaccagtactttaaaatgaagcctgaggttactgcattaaaagtgcctgagtaaagaagagatttaattattctccagtagctgagcaatgcttgtgaatcttttcttaagaaatcccaaaaagccaatattagttaaaattctgttgtttaatttggttatcttgctttataaattatgcctctaaacaatcaaatctatttttgaaatagactgaatgatgtcaagaaatatacctactgctatccgtatgtggtggattagaaatgtgttaaatctgcaaaaggtataaagatgtcagtttaatttctttgataatttaacctatgttgtatgtgaattatttattataaacttagcacgattctgtgactgtttttctctgtttcacgttcgttgagtgtaagcaatgaaaatgtcccaaataagttttttaagttttactttaataagattaatttcagtaaacattctagttgttcagtgtaacctttttatcttgatgcattgtaagtaaaatgaatcatttactcttgaaatgccagtcattgactgatgtagataatttaggattttcatataaaaatagctgtttaggaaggtgaaatacattcactgtctctgttggtggtacatcttgttgaattcaatattagaaagtatttctttttggggtaatataacttagaattaaatccctgtttctctatgtagtctggcagtataaatataaatatttaccatataatcttggaataagtattagttaatgttaccaaaatctgtattaaataatgttttcaaatgctaaaaaaaaaaaaaaaaaa

SEQ ID NO: 6199 - protein, 452 aa, Homo sapien; identical to SEQ ID NO: 3338

SEQ ID NO: 6200 - DNA, 4695 bp, Homo sapien; identical to SEQ ID NO: 885

SEQ ID NO: 6201 - protein, 413 aa, Homo sapien; identical to SEQ ID NO: 886

SEQ ID NO: 6202 - DNA, 3082 bp, Homo sapien; identical to SEQ ID NO: 3291

SEQ ID NO: 6203 - protein, 682 aa, Homo sapien; identical to SEQ ID NO: 3292

SEQ ID NO: 6204 - DNA, 1294 bp, Homo sapien
tggtggaatttctgaagggaagtgatgaaattatatttatttcagtgggcacttttccattttaccactgtaccattatttggttcctggagttatacactaattttcagtatattactgttaaattaccaacacaaggcaatttatttgaaagattccgtttatcctgccattgctttgaaaagcagcaggaaacgaaatcctttgacttgtatcagcttctgcagagcatctttgttttcctttgtcctttgtttcctaccttttgaatcagattccgttttagtcaggaagacttcttgggaccattcttagtaacctgaaatttcttttttaattgcatgaagtggattgatcatgagcaaatgatgtgcttatttctccctcactgttgaatatctttgaacttgctgttttcaatatgggcagcacaaaggtgagagatacatattaatagtagtatgtattactcttatacattagatacctatatttaaatgaaaggcccaatttgtaaacatatacattcatattctctcttgccccaagttttaggaacatgttaggatataggagacttaatttataataatgagagcatttttttattttactaaagccatttttatagtcaactatcttttcttatttgtgtgattagaacttagaaaaatatttactagttgaagttattatcagtttttaatttagttcttaaactcatttcacttctaataatttctgttataaattgccagcattttaatgaaaatctaatgatgtaataggcattttctttatttgaacctacctcttttattttctgaaccaaagagaaagatggactggtgtttgtgaaacatttttaaaaatgtagtttcatttatattagttatgtttgataaatgtctcagtatttttataatatgataagcctgggattctacttttagggttatttgtacttttgagtaatatataaagtgacaatattaaggtacatgatcagctctttctatttttactcgtaaaaattatggaaatgaataattttgctaacaactttgaaatttcaaacttctggaaaatatgaaaatattcattgttcattatgaatttaaattgtaaggtatgaatgtgatttgtctgtacatcttgtatcttttccaaaaaatgattctgtatcttttggaaaaaagccgagagttgaagatagtatatttctggtagtactgaatatttacttacagtttctatcaaaaatatatatttgtttctaaaaaaaaaaaaaaaa

SEQ ID NO: 6205 - protein, 96 aa, Homo sapien
MKLYLFQWALFHFTTVPLFGSWSYTLIFSILLLNYQHKAIYLKDSVYPAIALKSSRKRNPLTCISFCRASLFSFVLCFLPFESDSVLVRKTSWDHS

SEQ ID NO: 6206 - DNA, 4447 bp, Homo sapien; identical to SEQ ID NO: 3074

SEQ ID NO: 6207 - protein, 571 aa, Homo sapien; identical to SEQ ID NO: 3075

SEQ ID NO: 6208 - DNA, 2815 bp, Homo sapien; identical to SEQ ID NO: 2764

SEQ ID NO: 6209 - protein, 442 aa, Homo sapien; identical to SEQ ID NO: 2765

SEQ ID NO: 6210 - DNA, 2279 bp, Homo sapien
cttggcagggcacgtgcgggaggaagtggagctccctgtacgcgcggccctagtcggctcctcaacgtggagcgatgggaggccttgagaagaagaagtatgaacgaggctcggccaccaactacatcacccggaacaaagcccggaagaagctccagctgagcttggctgactttaggcggctgtgcattctgaagggcatttatccccatgaacccaaacacaagaagaaggttaacaagggttctacagcagcccgaacgttttaccttatcaaagacatcaggtttctcctccacgaacccattgtcaacaagttccgtgaatacaaggtgttcgtccggaagctccggaaggcttatgggaagagcgagtggaacactgtagagcgtttaaaggacaataagcccaactacaaactcgaccacatcatcaaggaacggtatcccacgttcatcgatgccctgcgggacctggacgatgccctctccatgtgcttcctgttttccaccttcccgcggactggcaagtgccacgtgcagaccattcagctgtgccgccggctcactgtggagttcatgcactacattatcgctgcccgtgccctgcgcaaggtcttcctgtccatcaaaggcatttactaccaggccgaggtactggggcagcccatcgtgtggatcactccctatgccttctcccatgaccacccgacagacgtggactacagggtcatggccaccttcaccgagttctacaccacgctgctgggctttgtcaacttccgcctttaccagttgctcaacctccactatcccccgaagctcgagggtcaggcccaagcagaggcaaaggccggtgagggcacctacgcgttggactccgagagttgtatggagaaactggcagccctcagtgccagcctggcccgcgtggtggtgcctgccacagaggaggaggccgaggtggatgagtttcccaccgatggggagatgtcagcgcaggaggaagaccgcaggaaggagctggaggcgcaggagaagcacaagaagctttttgagggcctgaagttcttcctgaaccgagaggtgccccgtgaggccctggccttcatcatcaggagttttggtggggaagtgtcctgggacaaatctttgtgcattggggccacctatgacgtcacagactcccgcatcacccatcagattgtcgaccggcctgggcagcagacctcagtcattggcaggtgctacgtgcagccccagtgggtgtttgactcagtgaacgccaggctccttctccccgtggcagagtacttctctggggtgcagctgcccccacacctttcaccctttgtgaccgagaaggaaggagattacgttccacctgagaagctgaagctgctggctctgcagcggggagaggacccaggaaacctgaatgagtcagaagaggaggaggaagaggacgacaacaacgaaggtgatggtgatgaagagggagaaaatgaggaggaggaggaagatgcagaggctggttcagaaaaggaggaagaggcccggctggcagccctggaagagcagaggatggaggggaagaagcccagggtgatggcaggcaccttgaagctggaggataagcagcggctggcccaggaggaggagagtgaggccaagcgcctggccattatgatgatgaagaagcgggagaagtacctgtaccagaagatcatgtttggcaagaggcgaaaaatccgagaggccaacaagctggcggagaagcggaaagcccacgatgaggcggtgaggtctgagaagaaggccaagaaggcaaggccggagtgagtgcctgcggcccctcacagggctgaggccagcccctagcagctggatgtggcagaggcaggccagaggacctaagtgtgatggaccagagtcacttctcctcctcctttctccagccagccctgacccctcatgctctctggctgggccagtgggcagccctcgcttcccttggatggagctgccctgctggtgcctggtcagagaagaggcctctgtgcccagcctgattctctgctcccaggagccagtgacatgaggtgcagaggcccacccagccccctacctactgcccccattcatcctggctttccacagccccctcccacacagttggacccgtgattctcagggtgctgtgatggggtgagggtagggggagcatttgttattaaatgactggacttttgtgccaattgcaaaaaaaaaaaaaaaaaa

SEQ ID NO: 6211 - protein, 588 aa, Homo sapien
MGGLEKKKYERGSATNYITRNKARKKLQLSLADFRRLCILKGIYPHEPKHKKKVNKGSTAARTFYLIKDIRFLLHEPIVNKFREYKVFVRKLRKAYGKSEWNTVERLKDNKPNYKLDHIIKERYPTFIDALRDLDDALSMCFLFSTFPRTGKCHVQTIQLCRRLTVEFMHYIIAARALRKVFLSIKGIYYQAEVLGQPIVWITPYAFSHDHPTDVDYRVMATFTEFYTTLLGFVNFRLYQLLNLHYPPKLEGQAQAEAKAGEGTYALDSESCMEKLAALSASLARVVVPATEEEAEVDEFPTDGEMSAQEEDRRKELEAQEKHKKLFEGLKFFLNREVPREALAFIIRSFGGEVSWDKSLCIGATYDVTDSRITHQIVDRPGQQTSVIGRCYVQPQWVFDSVNARLLLPVAEYFSGVQLPPHLSPFVTEKEGDYVPPEKLKLLALQRGEDPGNLNESEEEEEEDDNNEGDGDEEGENEEEEEDAEAGSEKEEEARLAALEEQRMEGKKPRVMAGTLKLEDKQRLAQEEESEAKRLAIMMMKKREKYLYQKIMFGKRRKIREANKLAEKRKAHDEAVRSEKKAKKARPE

SEQ ID NO: 6212 - DNA, 2756 bp, Homo sapien; identical to SEQ ID NO: 4857

SEQ ID NO: 6213 - protein, 686 aa, Homo sapien; identical to SEQ ID NO: 4858

SEQ ID NO: 6214 - DNA, 3557 bp, Homo sapien
gattcccgggcccacccgacccagcggcgcgaccctggccctccgggaccctccgctgactccaccgcgcacttcccgggacccccacacacatcccagccctccggccgatccctccctactcggtgccgggtgccccccgccctctccaggcccggatctcctcccccaggtccccgggtcggccccagccaggcccccttcgaaccccgccggcggcccgggctggggcgcaccatgcggctgcggctccggcttctggcgctgctgcttctgctgctggcaccgcccgcgcgcgccccgaagccctcggcgcaggacgtgagcctgggcgtggactggctgactcgctatggttacctgccgccaccccaccctgcccaggcccagctgcagagccctgagaagttgcgcgatgccatcaaagtcatgcagaggttcgcggggctgccggagaccggccgcatggacccagggacagtggccaccatgcgtaagccccgctgctccctgcctgacgtgctgggggtggcggggctggtcaggcggcgtcgccggtacgctctgagcggcagcgtgtggaagaagcgaaccctgacatggagggtacgttccttcccccagagctcccagctgagccaggagaccgtgcgggtcctcatgagctatgccctgatggcctggggcatggagtcaggcctcacatttcatgaggtggattccccccagggccaggagcccgacatcctcatcgactttgcccgcgccttccaccaggacagctaccccttcgacgggttggggggcaccctagcccatgccttcttccctggggagcaccccatctccggggacactcactttgacgatgaggagacctggacttttgggtcaaaagacggcgaggggaccgacctgtttgccgtggctgtccatgagtttggccacgccctgggcctgggccactcctcagcccccaactccattatgaggcccttctaccagggtccggtgggcgaccctgacaagtaccgcctgtctcaggatgaccgcgatggcctgcagcaactctatgggaaggcgccccaaaccccatatgacaagcccacaaggaaacccctggctcctccgccccagcccccggcctcgcccacacacagcccatccttccccatccctgatcgatgtgagggcaattttgacgccatcgccaacatccgaggggaaactttcttcttcaaaggcccctggttctggcgcctccagccctccggacagctggtgtccccgcgacccgcacggctgcaccgcttctgggaggggctgcccgcccaggtgagggtggtgcaggccgcctatgctcggcaccgagacggccgaatcctcctctttagcgggccccagttctgggtgttccaggaccggcagctggagggcggggcgcggccgctcacggagctggggctgcccccgggagaggaggtggacgccgtgttctcgtggccacagaacgggaagacctacctggtccgcggccggcagtactggcgctacgacgaggcggcggcgcgcccggaccccggctaccctcgcgacctgagcctctgggaaggcgcgcccccctcccctgacgatgtcaccgtcagcaacgcaggtgacacctacttcttcaagggcgcccactactggcgcttccccaagaacagcatcaagaccgagccggacgccccccagcccatggggcccaactggctggactgccccgccccgagctctggtccccgcgcccccaggccccccaaagcgacccccgtgtccgaaacctgcgattgtcagtgcgagctcaaccaggccgcaggacgttggcctgctcccatcccgctgctcctcttgcccctgctggtggggggtgtagcctcccgctgatggggggagccatccagaccgaacagcgccctccacggccgagtcccccgccgctggacctggtcgggggttgtgaggcgctgcggaggccccttgtctgttcccacggacgggggctcgggcgcggactaagcaggggggatctcccgcgcaggggcggcggcggcggggaccggtcgcctggcgctgggctcagtctcctcagggtctgagaccccggcgctgccaccggaacccgccttcaggggcgcacgcgcgctgggaccatgcgtcggtcgtcgcccccgtcgttccctcccggctgccgccagggggcggtcggaccccgcctcccgagcccggggaggggcggggaggacaaggggcgggcccgcggcctcacccggagggacggcagccccggtcgcgcgctggccccgcaggaccttccttttccaggaagagccagcttttctcggagcgcagtcctgggactctccgcagccccgccccgcctggccactgcgtctggcattcctgggtcgttagaggacaggcctgactgcgaagctgtgccttgcccctctcccacccgcagtttctcaccccgttctgctcccacaaggcccccctacagtcactgccacactggtggggacctgggacccagacccggaaccagcccagatatcacccctgaggacccatgcgccacgtcctgggtggtggaatcagtggctggagggacgacccttgctctccaggctgttaaccttttccgttgctcccccgccacccacctcctcctccccaggccacccagcttgggcacctccctgggcccagaactgccttccattcaatggggaacccttctatccccaagaaccccttccctgcttgcaccctggagagaacagcttgactcccatcaactcaacgctggtggaaagacagggaccgaaccctggctcaggcctggtcattgcctcctcagcactccctcctgggaggccttagctctagagtgaggggtgggtggaacctgggggcacctcgttcaccctgtccccactccccacagttttaggatctaaatgattgcctctggaactattcttctagactatcccacatcagaatcactgggaaatttaagtttgcagatcccacactcaccctgaatcctcactcagggtggggtcaggaatctgcattttaactagtcgcggggattgtggggggcagtagctggctgtttcgtggcatttctgtggctctgcagtgttcctccaccccaggaccaatatgttcaggccacaccgatggcctgaaccccatgggtagagtcacttaggggccacttcctaagttgctgtccagcctcagtgaccccctagtgcttcctggagctgaggctgtgggcggctgtcccagcaaccatgcgaggggttgccccagttgctcatacaaacagatcagcatgaggacagaaggcaggagactttggtcagttacctgggaattctgggctgccaggaaacgatttgggcctctgtcagtttcttttccatgtatgaggagggggaaatttgtatattagaaacttattcatcccactcaggacaataaaaacgaatgtacaaaaaaaa

SEQ ID NO: 6215 - protein, 562 aa, Homo sapien
MRLRLRLLALLLLLLAPPARAPKPSAQDVSLGVDWLTRYGYLPPPHPAQAQLQSPEKLRDAIKVMQRFAGLPETGRMDPGTVATMRKPRCSLPDVLGVAGLVRRRRRYALSGSVWKKRTLTWRVRSFPQSSQLSQETVRVLMSYALMAWGMESGLTFHEVDSPQGQEPDILIDFARAFHQDSYPFDGLGGTLAHAFFPGEHPISGDTHFDDEETWTFGSKDGEGTDLFAVAVHEFGHALGLGHSSAPNSIMRPFYQGPVGDPDKYRLSQDDRDGLQQLYGKAPQTPYDKPTRKPLAPPPQPPASPTHSPSFPIPDRCEGNFDAIANIRGETFFFKGPWFWRLQPSGQLVSPRPARLHRFWEGLPAQVRVVQAAYARHRDGRILLFSGPQFWVFQDRQLEGGARPLTELGLPPGEEVDAVFSWPQNGKTYLVRGRQYWRYDEAAARPDPGYPRDLSLWEGAPPSPDDVTVSNAGDTYFFKGAHYWRFPKNSIKTEPDAPQPMGPNWLDCPAPSSGPRAPRPPKATPVSETCDCQCELNQAAGRWPAPIPLLLLPLLVGGVASR

SEQ ID NO: 6216 - DNA, 583 bp, Homo sapien
gccagctgccggtctttcgggggctccgtaactttctatccgtccgcgtcagcgccttgccaccctcatctccaatatgcctggtccgacccccagtggcactaacgtgggatcctcagggcgctctcccagcaaagcagtggccgcccgggcggcgggatccactgtccggcagaggaaaaatgccagctgtgggacaaggagtgcaggccgcacaacctcggcaggcaccggggggatgtggcgattctacacagaagattcacctgggctcaaagttggccctgttccagtattggttatgagtcttctgttcatcgcttctgtatttatgttgcacatttggggcaagtacactcgttcgtagattcagttacatccatctgtcatctgaagaaggaggaaaaaacccaacatttcttggaccaaaagtatagtgactatctgttcatgagagaaattttctgtaagcttgctgttttacaggggatttatcaataattgattttgaggaatcagtttttttctatggctaataaactttttaattcacttatactgaaaaaaaaaaaaaaaaaaaaaa

SEQ ID NO: 6217 - protein, 96 aa, Homo sapien
MPGPTPSGTNVGSSGRSPSKAVAARAAGSTVRQRKNASCGTRSAGRTTSAGTGGMWRFYTEDSPGLKVGPVPVLVMSLLFIASVFMLHIWGKYTRS

SEQ ID NO: 6218 - DNA, 1421 bp, Homo sapien
acttactgcgggacggccttggagagtactcgggttcgtgaacttcccggaggcgcaatgagctgcattaacctgcccactgtgctgcccggctcccccagcaagacccgggggcagatccaggtgattctcgggccgatgttctcaggaaaaagcacagagttgatgagacgcgtccgtcgcttccagattgctcagtacaagtgcctggtgatcaagtatgccaaagacactcgctacagcagcagcttctgcacacatgaccggaacaccatggaggcgctgcccgcctgcctgctccgagacgtggcccaggaggccctgggcgtggctgtcataggcatcgacgaggggcagtttttccctgacatcatggagttctgcgaggccatggccaacgccgggaagaccgtaattgtggctgcactggatgggaccttccagaggaagccatttggggccatcctgaacctggtgccgctggccgagagcgtggtgaagctgacggcggtgtgcatggagtgcttccgggaagccgcctataccaagaggctcggcacagagaaggaggtcgaggtgattgggggagcagacaagtaccactccgtgtgtcggctctgctacttcaagaaggcctcaggccagcctgccgggccggacaacaaagagaactgcccagtgccaggaaagccaggggaagccgtggctgccaggaagctctttgccccacagcagattctgcaatgcagccctgccaactgagggacctgcaagggccgcccgctcccttcctgccactgccgcctactggacgctgccctgcatgctgcccagccactccaggaggaagtcgggaggcgtggagggtgaccacaccttggccttctgggaactctcctttgtgtggctgccccacctgccgcatgctccctcctctcctacccactggtctgcttaaagcttccctctcagctgctgggacgatcgcccaggctggagctggccccgcttggtggcctgggatctggcacactccctctccttggggtgagggacagagccccacgctgttgacatcagcctgcttcttcccctctgcggctttcactgctgagtttctgttctccctgggaagcctgtgccagcacctttgagccttggcccacactgaggcttaggcctctctgcctgggatgggctcccaccctcccctgaggatggcctggattcacgccctcttgtttccttttgggctcaaagcccttcctacctctggtgatggtttccacaggaacaacagcatctttcaccaagatgggtggcaccaaccttgctgggacttggatcccaggggcttatctcttcaagtgtggagagggcagggtccacgcctctgctgtagcttatgaaattaactaatt

SEQ ID NO: 6219 - protein, 234 aa, Homo sapien
MSCINLPTVLPGSPSKTRGQIQVILGPMFSGKSTELMRRVRRFQIAQYKCLVIKYAKDTRYSSSFCTHDRNTMEALPACLLRDVAQEALGVAVIGIDEGQFFPDIMEFCEAMANAGKTVIVAALDGTFQRKPFGAILNLVPLAESVVKLTAVCMECFREAAYTKRLGTEKEVEVIGGADKYHSVCRLCYFKKASGQPAGPDNKENCPVPGKPGEAVAARKLFAPQQILQCSPAN

SEQ ID NO: 6220 - DNA, 3589 bp, Homo sapien
actggcggccatggaactcaccggtaatagaggacacatctcttaactgggttgctctaagaactgatgtctaaaccgtctcagcatggcctgtagaggaggagctgggaatggccaccgtgcctcagctacactctctcgggttagccctggaagtctttacacatgtagaacccgtacccataatatatgcatggtatctgactttttctacccaaatatgggaggcgtggaaagccacatttaccagctctctcagtgcctgattgaaagagggcataaggttataattgtcacccatgcttatggaaatcgaaaaggcatccgttacctcaccagtggcctcaaagtctattacttgcctctgaaagtcatgtacaaccagtctacagccacgaccctctttcacagtctgccattgctcaggtacatatttgttcgggagagagtcacgataatccattcacatagttctttttctgctatggcccatgatgctctcttccacgccaagacaatggggcttcagacagtcttcacggaccattccctttttggatttgctgatgtcagctcggtgcttacaaacaagcttctaaccgtgtctctttgtgatacaaaccacatcatttgtgtgtcttatactagtaaggaaaatactgtactaagagcagcactgaatcctgaaatagtgtccgtcattcctaatgctgtagatcctactgacttcactccagacccatttagaaggcatgatagtataactattgttgttgtcagcagacttgtttacagaaaagggatcgatttgcttagtggtataatacctgaactctgtcagaaatatccagatttaaatttcataattggaggagagggaccaaagagaatcattttggaagaagttcgggaaagataccagctgcatgacagggtgcgtcttttgggagctttagaacacaaggatgttagaaatgtcttagttcaaggacatatttttctgaatacctcccttactgaagcattctgcatggcgatcgtggaagcagccagttgtggtttacaggttgtaagtaccagagttggtggaattcctgaggtgcttccagaaaaccttattattttatgtgagccttcagtaaaatctttgtgtgaaggattggaaaaggctattttccaactgaagtcagggacattgccagctccagaaaacatccataacatagtaaagactttctacacctggaggaatgttgcagaaagaactgaaaaggtatatgaccgggtatcagtggaagctgtgttgccaatggacaaacgactggacagacttatttctcactgcggcccagtaacaggctacatctttgctttgttggcagttttcaacttcctcttcctcattttcttgagatggatgactccagattctatcattgatgttgcaatagatgccactgggccacggggtgcctggactaataactattctcacagtaaaagagggggtgagaataatgagatatctgaaaccaggtagaaggaagcctagattgtaagattttaaacatttgtaatagttctataaagactatggaaaataaccttgcttttggggggtttttgtttttttagagttaatttagtaagttatgctacctctatatcattcaatattttctgttgaggaaagataaaaatgtatgcaattcctgagtgtagaaacttcttgcacttatttaaaatttaggagagaacatttaagccactcaggtatgcaatttttcagactactgaaatccctgtagcagagatgttttaacattatattttgagagctttgggtgctgaagggccaaacgttttctgggcattttttggccagtttttaatgtaacaccattagacactcaccagatgtttacaagttttctttaggggaactacaacaattatatgaactgttttatatcatgttcatatacatttattaggaatctaaatcatgtctttgaacatttattaggttcactcagtaggtgttacatgtaattaacaggttccttgagtaagatagtccatcagttaccagcacattttgaacccctgctctgtgtagaatgttgaactagatgcttcccgccattaaggaccaggggtgcattcactctttgtttaccattcaaatggcttacttcatcataattgtggttgatatgagatcaatatccaacatgccaaaaatgctcatgccagttaatgccaggaaaaaaatcaccgacacactactagtactttgttcctgttgtatgcattctcctaggtagagcctccatcttcagttgtgtttgtgaaggtattttttgctttttaaatactggggaccgatatcactgttgatagtgcagagaaaccctccacatttttcagtgcataattgagttttctataaatgccttcgtgttttctgagcagaatgtacgaggtgtgccatcccaaaaccagctgctaccctgtccttttaatgtaagtcactccccttcactgtggcctcgctgatgtctgataagtattgtcagtgtgcaaaaggctttacttcagaatggtttatttatagcaaactaagttgaaaattttagaaacagtctttgtgggtggatgttattaactgtcattgttgttgcccagagccatgggttttttaaccccaaattatccacatggtgtgtattatgaattctttgaactcttaaggtttttgtgagaaaaggactgtgaattcaaaacaataaggcacttgtgggtgcactacatagattctgacagtgttgtgattctgtataggatttttaaaaatgacaacattcacaaaatttattactttttaaaaaataacatgcctattaactggttgcactgatataaaagaaatatatttgtgttttgtttgtactaaaatgcaaaagcaagagtgcaatttttaaaatctagaagttaggggttttgttggagaaaaatggactgatctttaaactattcagtcttactgggatttttatgcatagaaactcacatataaacatgaaataaacagtgccagtattcataggaaagtgagaaactgtaatatttggccattattctattcaacaggttttagaggcatgccaccattttttccttatatttttgcttaatttttttaaattgtcatttaattcttaaactgtcatttatttgagatggaaataagatctaaagttagttgcctttgcctgtaaaacatgtgatttgcaaattattattttcctttttttttaacaaatggaagtaaatttgtttcacgtaaatcttaattttcaacctttctggataccttaattgtaactgtcagtttgcactggtcggtatatggaaacacattgctctaccctgctacttagttgattttaaagtgaatttacagtgatgagaaatttgtgaaaaatatattgtatttcttttgatgtttcaaaaggttgcctatgaaaaactgatttgttaaaacatgctacatgtccaaaaataaagaccagaatgacattttgat

SEQ ID NO: 6221 - protein, 484 aa, Homo sapien
MACRGGAGNGHRASATLSRVSPGSLYTCRTRTHNICMVSDFFYPNMGGVESHIYQLSQCLIERGHKVIIVTHAYGNRKGIRYLTSGLKVYYLPLKVMYNQSTATTLFHSLPLLRYIFVRERVTIIHSHSSFSAMAHDALFHAKTMGLQTVFTDHSLFGFADVSSVLTNKLLTVSLCDTNHIICVSYTSKENTVLRAALNPEIVSVIPNAVDPTDFTPDPFRRHDSITIVVVSRLVYRKGIDLLSGIIPELCQKYPDLNFIIGGEGPKRIILEEVRERYQLHDRVRLLGALEHKDVRNVLVQGHIFLNTSLTEAFCMAIVEAASCGLQVVSTRVGGIPEVLPENLIILCEPSVKSLCEGLEKAIFQLKSGTLPAPENIHNIVKTFYTWRNVAERTEKVYDRVSVEAVLPMDKRLDRLISHCGPVTGYIFALLAVFNFLFLIFLRWMTPDSIIDVAIDATGPRGAWTNNYSHSKRGGENNEISETR

SEQ ID NO: 6222 - DNA, 2270 bp, Homo sapien; identical to SEQ ID NO: 3708

SEQ ID NO: 6223 - protein, 160 aa, Homo sapien; identical to SEQ ID NO: 3709

SEQ ID NO: 6224 - DNA, 642 bp, Homo sapien; identical to SEQ ID NO: 3597

SEQ ID NO: 6225 - protein, 162 aa, Homo sapien; identical to SEQ ID NO: 3598

SEQ ID NO: 6226 - DNA, 1538 bp, Homo sapien
atggatgggggaaccgggcggcgagacggcggcaggacggcggcaggatgtgtgaccggaatggtggtcggcggcttcgacagtggctgatcgagcagattgacagtagcatgtatccaggactgatttgggagaatgaggagaagagcatgttccggatcccttggaaacacgctggcaagcaagattataatcaggaagtggatgcctccatttttaaggcctgggcagtttttaaagggaagtttaaagaaggggacaaagctgaaccagccacttggaagacgaggttacgctgtgctttgaataagagcccagattttgaggaagtgacggaccggtcccaactggacatttccgagccatacaaagtttaccgaattgttcctgaggaagagcaaaaatgcaaactaggcgtggcaactgctggctgcgtgaatgaagttacagagatggagtgcggtcgctctgaaatcgacgagctgatcaaggagccttctgtggacgattacatggggatgatcaaaaggagcccttccccgccggaggcctgtcggagtcagctccttccagactggtgggcgcagcagcccagcacaggcgtgccgctggtgacggggtacaccacctacgacgcgcaccattcagcattctcccagatggtgatcagcttctactatgggggcaagctggtgggccaggccaccaccacctgccccgagggctgccgcctgtccctgagccagcctgggctgcccggcaccaagctgtatgggcccgagggcctggagctggtgcgcttcccgccggccgacgccatccccagcgagcgacagaggcaggtgacgcggaagctgttcgggcacctggagcgcggggtgctgctgcacagcagccggcagggcgtgttcgtcaagcggctgtgccagggccgcgtgttctgcagcggcaacgccgtggtgtgcaaaggcaggcccaacaagctggagcgtgatgaggtggtccaggtcttcgacaccagccagttcttccgagagctgcagcagttctataacagccagggccggcttcctgacggcagggtggtgctgtgctttggggaagagtttccggatatggcccccttgcgctccaaactcattctcgtgcagattgagcagctgtatgtccggcaactggcagaagaggctgggaagagctgtggagccggctctgtgatgcaggcccccgaggagccgccgccagaccaggtcttccggatgtttccagatatttgtgcctcacaccagagatcatttttcagagaaaaccaacagatcaccgtctaagtgcgtcgcttgggcgccccaccccgtctgcgtcctgcatccatctccctgttacagtggcccgcatcatgattaaagaatgtggatccctctgtctggggtgggatgccttactttgcacttaatttaataagggcattctcggaggagtagacgtttaatacgaagtggcgcatagccctgccgagatgtcggtgatggcctgatgcg

SEQ ID NO: 6227 - protein, 426 aa, Homo sapien
MCDRNGGRRLRQWLIEQIDSSMYPGLIWENEEKSMFRIPWKHAGKQDYNQEVDASIFKAWAVFKGKFKEGDKAEPATWKTRLRCALNKSPDFEEVTDRSQLDISEPYKVYRIVPEEEQKCKLGVATAGCVNEVTEMECGRSEIDELIKEPSVDDYMGMIKRSPSPPEACRSQLLPDWWAQQPSTGVPLVTGYTTYDAHHSAFSQMVISFYYGGKLVGQATTTCPEGCRLSLSQPGLPGTKLYGPEGLELVRFPPADAIPSERQRQVTRKLFGHLERGVLLHSSRQGVFVKRLCQGRVFCSGNAVVCKGRPNKLERDEVVQVFDTSQFFRELQQFYNSQGRLPDGRVVLCFGEEFPDMAPLRSKLILVQIEQLYVRQLAEEAGKSCGAGSVMQAPEEPPPDQVFRMFPDICASHQRSFFRENQQITV

SEQ ID NO: 6228 - DNA, 1402 bp, Homo sapien
tggggccggagaggcggcgaggcggcggcggcggcggcaagatggcggacttcctgccgtcgcggtccgtgctgtccgtgtgcttccccggctgcctgctgacgagtggcgaggccgagcagcaacgcaagtccaaggagatcgacaaatgcctgtctcgggaaaagacctatgtgaagcggctggtgaagatcctgctgctgggcgcgggcgagagcggcaagtccaccttcctgaagcagatgcggatcatccacgggcaggacttcgaccagcgcgcgcgcgaggagttccgccccaccatctacagcaacgtgatcaaaggtatgagggtgctggttgatgctcgagagaagcttcatattccctggggagacaactcaaaccaacaacatggagataagatgatgtcgtttgatacccgggcccccatggcagcccaaggaatggtggaaacaagggttttcttacaatatcttcctgctataagagcattatgggcagacagcggcatacagaatgcctatgaccggcgtcgagaatttcaactgggtgaatctgtaaaatatttcctggataacttggataaacttggagaaccagattatattccatcacaacaagatattctgcttgccagaagacccaccaaaggcatccatgaatacgactttgaaataaaaaatgttcctttcaaaatgcttgatgtaggtggtcagagatcagaaaggaaacgttggtttgaatgtttcgacagtgtgacatcaatacttttccttgtttcctcaagtgaatttgaccaggtgcttatggaagatcgactgaccaatcgccttacagagtctctgaacatttttgaaacaatcgtcaataaccgggttttcagcaatgtctccataattctgttcttaaacaagacagacttgcttgaggagaaggtgcaaattgtgagcatcaaagactatttcctagaatttgaaggggatccccactgcttaagagacgtccaaaaattcctggtggaatgtttccggaacaaacgccgggaccagcaacagaagcccttataccaccacttcaccactgctatcaacacggagaacatccgccttgttttccgcgacgtgaaggatactattctgcatgacaacctcaagcagcttatgctacagtgatgtacaaaagacttgctgttttaatatctttttgtgtttttgatgttttctgtttgttttgttttttaaaatagcagtttacaaccagaattagaacaatcttaattctacgtttaacttcttgaaaatcttagtactttttctgcggcctttggtttgtggctgaaagctgttgagtgactcatcgccaagatttgctgtaatgcaggctttgatctgtttcaccc

SEQ ID NO: 6229 - protein, 377 aa, Homo sapien
MADFLPSRSVLSVCFPGCLLTSGEAEQQRKSKEIDKCLSREKTYVKRLVKILLLGAGESGKSTFLKQMRIIHGQDFDQRAREEFRPTIYSNVIKGMRVLVDAREKLHIPWGDNSNQQHGDKMMSFDTRAPMAAQGMVETRVFLQYLPAIRALWADSGIQNAYDRRREFQLGESVKYFLDNLDKLGEPDYIPSQQDILLARRPTKGIHEYDFEIKNVPFKMLDVGGQRSERKRWFECFDSVTSILFLVSSSEFDQVLMEDRLTNRLTESLNIFETIVNNRVFSNVSIILFLNKTDLLEEKVQIVSIKDYFLEFEGDPHCLRDVQKFLVECFRNKRRDQQQKPLYHHFTTAINTENIRLVFRDVKDTILHDNLKQLMLQ

SEQ ID NO: 6230 - DNA, 2003 bp, Homo sapien
gctcgtccgagtacatgtgagcggtaatcgcccctgcagctggttatcctgacattatgcactccgaagcagaagaatccaaggaaggcctaggcttaaacactggcatatatggagagaacagttgccactcgactcagagattgagtagacacccaaagaactgcagttcttaagccttaggagaagcgagagaaatggcagtggccacagatgtctttaattccaaaaacctggccgttcaggcacaaaagaagatcttgggtaaaatggtgtccaaatccatcgccaccaccttaatagacgacacaagtagtgaggtgctggatgagctctacagagtgaccagggagtacacccaaaacaagaaggaggcagagaagatcatcaagaacctcatcaagacagtcatcaagctggccattctttataggaataatcagtttaatcaagatgagctagcattgatggagaaatttaagaagaaagttcatcagcttgctatgaccgtggtcagtttccatcaggtggattatacctttgaccggaatgtgttatccaggctgttaaatgaatgcagagagatgctgcaccaaatcattcagcgccacctcactgccaagtcacatggacgggttaataatgtgtttgatcatttttcagattgtgaatttttggctgccttgtataatccttttgggaattttaaaccccacttacaaaaactatgtgatggtatcaacaaaatgttggatgaagagaacatatgagcacatgagttaagattgtgactgatcatgatttatttgaagatggagcactgctgatttatgaaggaaaaaagaagaattttctaaagattacacatatttcagaaagactttacccaattcagttgtcagacataatgatttatttgaaggcttgttttatttgaagaaaagcatattgccaaaaattctggttaaaagcttcctaacgggtaacagaccatgggagagatatgtggttgggtaatgcaaatgtagttatacaaagaaaaatacagatgtctccagacctgaggactttttaatagggcagttgttgtgttggtggcacattggatatttctaacatgtacaaagctatgtattttgatttactttcatttcttgctatgtatatgtacttttcttaaaatgccaagaactttctcttgctatcattgctccttttgaaacaattcaattttcatgtctacagctgactgttttgttaagattgagtcatcgacattcaggatttaagtctgaggtagtcaaccctcaggaaaaaaaaatggcttatctgaaatcagtactgtggaaatgaactatattagctattatgaataatgtccagtataagaatatgcttctggaattgagttctccttttaagtaccaatgatacttaaatttctcagaaatgtaatggtgtgtcattgccttgaaatgcttgcttagggcttcttttatgttatcttaaaaagtgctggtgaattttccattttttacatccatttcacatgtaagagacacaaaagtctagattggtcttgatattgagataataaaaagtaagtagcattaagaaaggtaacaatcttcattctacagatgaactcattgaaacaatttaggggaatgaggggcaaaaggggagaaatactgctaaagaacatgagcataaaaatgcgtgcgtttcagtgtttaagaaggcttgataaagaatgtcacttttttatttaactgataagatttttgttattttttactttgataagtaaaccaaagaatatttgtatttcaagcagtttgtgtggtgtttctatataattttctgtgtataaataataaagtaggcatttgtttattttgtaaaaaagaaatgaaaatctgctggccagctatgtcctctaggaaatgacagacccaaccaccagcaataaacatttccattgtcaaaaaaaaaaaaaaaaa

SEQ ID NO: 6231 - protein, 190 aa, Homo sapien
MAVATDVFNSKNLAVQAQKKILGKMVSKSIATTLIDDTSSEVLDELYRVTREYTQNKKEAEKIIKNLIKTVIKLAILYRNNQFNQDELALMEKFKKKVHQLAMTVVSFHQVDYTFDRNVLSRLLNECREMLHQIIQRHLTAKSHGRVNNVFDHFSDCEFLAALYNPFGNFKPHLQKLCDGINKMLDEENI

SEQ ID NO: 6232 - DNA, 1406 bp, Homo sapien
ggcacgagggcgcgcaaggcaccggtggcagcggcgacggcagctgcgacagcaacccctgctgggccgaaactgggcagagcggagcagacgtctgaagcagcgcgagtgaggcgcgagggtagcgcccgcgcccgggaagacccctcggcgcgaaccggcagcccagccccgggtcccggttcccaaggccccgcctctagggcctggggactaatcggattgagagcgcgccggcccgggccgcgaactcgccaattgcggagggcggtggccaccgcccaatccggagcagacaggtgcgaggtccggaaggcggaggccaatcggcggcggttgcgacctgctggggcaggtctcggccaataaggaggctcgagtgacatcttcgcgcaccaatcgggagtgagggagcattcgtgcccgctcgcccttccggccagacctctatttaccaggggcgtgcagcccgcttgccaatcagagcgcggctgagcggccccgcagccaacccccgaggagcggccggctggcgtccgccgcgcccaggagttggggatgtcctacaaacccatcgcccctgctcccagcagcacccctggctccagcacccctgggccgggcaccccggtccctacaggaagcgtcccgtcgccgtcgggctcagtgccaggagccggcgctcctttcagaccgctgtttaacgactttggaccgccttccatgggctacgtgcaggcgatgaagccacccggcgcccagggctcccagagcacctacacggacctgctgtcagtcatagaggagatgggcaaagagatccggcctacctatgctggcagcaagagcgccatggagcgcctgaagagaggtatcatccatgcccgggccctagtcagagagtgcctggcagagacagagcggaacgcccgcacgtaacaggaagcgcctcggcctcagcgtctggacctatccggccactgcagagcacccgcttctccctggccttcatcccgagttgcactaaccatcctgggcttcctgtcctgtgtcccttggtgggtcccctccaggaaccaaggagtggccctccaggtggcagcactaaggacacccccccacaacaagagttagcagcgaggtccccatgagtcccacccatgacctgccgacagtgttgcccaccggaacttttgtggcccctaccgctcagcccttcccagcacttctcccactttgtcccgagcctccttctcccccagcaggggcacaggcctggcacctccctgccttgtgtcctgagccatagtgactcttttatctgtgtgtcttttgctaaatatgccctttttatattaataaaagatgatttggagttgtgctctcaaaaaaaaaaaaaaaaaaaa

SEQ ID NO: 6233 - protein, 126 aa, Homo sapien
MSYKPIAPAPSSTPGSSTPGPGTPVPTGSVPSPSGSVPGAGAPFRPLFNDFGPPSMGYVQAMKPPGAQGSQSTYTDLLSVIEEMGKEIRPTYAGSKSAMERLKRGIIHARALVRECLAETERNART

SEQ ID NO: 6234 - DNA, 1238 bp, Homo sapien; identical to SEQ ID NO: 548

SEQ ID NO: 6235 - protein, 203 aa, Homo sapien; identical to SEQ ID NO: 549

SEQ ID NO: 6236 - DNA, 1610 bp, Homo sapien
ggcacgagggagagaactagtctcgagtttttttttttttttttttgacaagatggcggcaggaggcagtggcgttggtgggaagcgcagctcgaaaagcgatgccgattctggtttcctggggctgcggcccacttcggtggacccagcgctgaggcggcggcggcgaggcccaagaaataagaagcggggctggcggcggcttgctcaggagccgctggggctggaggttgaccagttcctggaagacgtgcggctacaggagcgcacgagcggtggcttgttgtcagaggccccaaatgaaaaactcttcttcgtggacactggctccaaggaaaaagggctgacaaagaagagaaccaaagtccagaagaagtcactgcttctcaagaaaccccttcgggttgacctcatcctcgagaacacatccaaagtccctgcccccaaagacgtcctcgcccaccaggtccccaacgccaagaagctcaggcggaaggagcagctatgggagaagctggccaagcagggcgagctgccccgggaggtgcgcagggcccaggcccggctcctcaacccttctgcaacaagggccaagcccgggccccaggacaccgtagagcggcccttctacgacctctgggcctcagacaaccccctggacaggccgttggttggccaggatgagtttttcctggagcagaccaagaagaaaggagtgaagcggccagcacgcctgcacaccaagccgtcccaggcgcccgccgtggaggtggcgcctgccggagcttcctacaatccatcctttgaagaccaccagaccctgctctcagcggcccacgaggtggagttgcagcggcagaaggaggcggagaagctggagcggcagctggccctgcccgccacggagcaggccgccacccaggagtccacattccaggagctgtgcgaggggctgctggaggagtcggatggtgagggggagccaggccagggcgaggggccggaggctggggatgccgaggtctgtcccacgcccgcccgcctggccaccacagagaagaagacggagcagcagcggcggcgggagaaggctgtgcacaggctgcgggtacagcaggccgcgttgcgggccgcccggctccggcaccaggagctgttccggctgcgcgggatcaaggcccaggtggccctgaggctggcggagctggcgcggcggcggaggcggcggcaggcgcggcgggaggctgaggctgacaagccccgaaggctgggacggctcaagtaccaggcacctgacatcgacgtgcagctgagctcggagctgacagactcgctcaggaccctgaagcccgagggcaacatccttcgagaccggttcaagagcttccagaggaggaatatgatcgagcctcgagagagagccaagttcaaacgcaagtacaaggtgaagctggtggagaagcgggcgttccgtgagatccagttgtagctgccatcagatgccggagactcgcccttcaataaaaaatctcttctagctgaaaaaaaaaaaaaaaaaaaaaaaaaaaaaaaaaaaaaaaaaaaaaaaaaaaaaaaaaaaaaaaaaaaaa

SEQ ID NO: 6237 - protein, 478 aa, Homo sapien
MAAGGSGVGGKRSSKSDADSGFLGLRPTSVDPALRRRRRGPRNKKRGWRRLAQEPLGLEVDQFLEDVRLQERTSGGLLSEAPNEKLFFVDTGSKEKGLTKKRTKVQKKSLLLKKPLRVDLILENTSKVPAPKDVLAHQVPNAKKLRRKEQLWEKLAKQGELPREVRRAQARLLNPSATRAKPGPQDTVERPFYDLWASDNPLDRPLVGQDEFFLEQTKKKGVKRPARLHTKPSQAPAVEVAPAGASYNPSFEDHQTLLSAAHEVELQRQKEAEKLERQLALPATEQAATQESTFQELCEGLLEESDGEGEPGQGEGPEAGDAEVCPTPARLATTEKKTEQQRRREKAVHRLRVQQAALRAARLRHQELFRLRGIKAQVALRLAELARRRRRRQARREAEADKPRRLGRLKYQAPDIDVQLSSELTDSLRTLKPEGNILRDRFKSFQRRNMIEPRERAKFKRKYKVKLVEKRAFREIQL

SEQ ID NO: 6238 - DNA, 2998 bp, Homo sapien
tgttcagattcaattaggatttgcagctgagttttccaatgtcatgatcatctatacaagtatagtttacaaaccaccggagataataatgtgtgatgcctacgttactgattttccacttgatctagatattgatccaaaagatgcaaataaaggcacacctgaagaaactggcagctacttggtatcaaaggatcttcccaagcattgcctctataccagactcagttcactgcaaaaattaaaggaacatctagtcttcacagtatgtttatcatatcagtactcaggattggaagatactgtagaggacaagcaggaagtgaatgttgggaaacctctcattgctaaattagacatgcatcgaggtttgggaaggaagacttgctttcaaacttgtcttatgtctaatggtccttaccagagttctgcagccacctcaggaggagcagggcattatcactcattgcaagacccattccatggtgtttaccattcacatcctggtaatccaagtaatgttacaccagcagatagctgtcattgcagccggactccagatgcatttatttcaagtttcgctcaccatgcttcatgtcattttagtagaagtaatgtgccagtagagacaactgatgaaataccatttagtttctctgacaggctcagaatttctgaaaaatgacctccttgtttttgaaagttagcataattttagatgcctgtgaaatagtactgcacttacataaagtgagacattgtgaaaaggcaaatttgtatatgtagagaaagaatagtagtaactgtttcatagcaaacttcaggactttgagatgttgaaattacattatttaattacagacttcctctttctaagattttgtgaattggttgaatagttctatacaaatgaagtatggaggtgtgtatgtttatatgtatataacaaaatattttcattgtgaccactctgaagtaagagcaatgggaatggcattattgtagaataagtcattgtatttttaacaccagaaagaaccttgccgatcaccaggcataacctaattttatccatggaagaaacacagaaaggcatctaagttagagctggcaccagaactgagacctccagaaatctattccagtattttttccactacacaactgccttcctgacaggttctgagataagtgttatgtttgtagatagagtgaaatatatttatatatatataaatatatacagatacatatctgtgtattatctcaaggaatgtacaaactttagtttttgattataaggacttcactgcaagttttagttaagaggtttgtatataaatctgttatagaacaggctgaaatttcttgttcataagattatgaaaccacatgagaagtgataaaatgtttgttaaagctagatagaggttaagaatcaagatataatggataattttcatagctgcctatcagaatttcccaaatatttagcatcttccttgataatatgtattttcttcttgaatttcactggcctaatgagataatactcttatctttggctctacctaaaagttggttaaaaatgcaattggcattaacaaggaaaaatactgaattagtaattttaaaagtctcacaaagaaaatcccaggcctagatggctgcattgttgaattctgccaaacattaaaattagcactaattttttgcacactgtttctaaaagtaggagaggaaagaacacttcccaacttactctaggtcagtattaccctgatactagactagacatcacaagaaaactataagccaatattccttattaatacaaacacaaaaatcattaacaaaaatattagcaaactgaatccagcaacctataaaaaggattctatatcatgaccaagtggaatttatcccaggaattcaaggttggttcaacatctaaaaatcaaataagctaatatacagtcagttctcattattcacagtaattatgttctacagaatattctcccataaacactgaattaaatatggaacaactgcttttaggagaaagtgtatttgtgtatatgtgtgtatacatatgtttatctcacacacattatgagcttgaattcttaattcatcctagcaaattctaccttattttacagaagtgaaagtgaggtatcagaagtgttaagtgacatgcctgaggcacccccctaacaggtgtcagagctgaaattcaaaccccatccagctggccccggagccagagcttcttgtactacacagaattgcccctgccatttccaccctccagtcatttctctatgagactgaagcaggaaggcagagcatcatcttgttcagcctcagctgggaacatgtgtactgggtgactcaaatttttcacccatttacacatatccacaaatgactgcaaaagtgccacggatatcaatttgagggttataaattttagcaagttggtaaattcacaaatacataaccttgaataatgaggatcaactgtaccatatttaataaagcacaaaacccacacagattgtcttattacagcatttgataaaatccaaaactctttcataaaaacactcaacaaacttaggaataaaaggaatcttcctagatatgataaatataacatctatgaaaagcccacacctaacattatacttcatggtgatagactgaaggctgaatgttttccccttaagattgggaagaaggacaaggatgttcactcggcactacttctattcagcattgtacttgaagttctagccacagcagttaggttaggaattcaaggtttgttcaacatctaaaaatcaaataagctaataaagaaaagaggtttatactgcaaaagaagtgaaactatatgtattcacagttgatacatagttgtatatagaaaatgctaaagaatccataaaaagtaataaatgagttcaacaggttaaaaaaaaaaaaaaaa

SEQ ID NO: 6239 - DNA, 2414 bp, Homo sapien; identical to SEQ ID NO: 3187

SEQ ID NO: 6240 - protein, 633 aa, Homo sapien; identical to SEQ ID NO: 3188

SEQ ID NO: 6241 - DNA, 625 bp, Homo sapien
cgcagccaggagccatgggcaacatctcctctaacatctcggccttccagtccctgcatatcgtcatgttgggcttggactcggccggcaagaccacggtgctctaccggctcaagttcaacgagttcgtgaacacggtgcccaccatcggcttcaacaccgagaagatcaagctgagcaacggcacggccaagggcatcagctgccacttctgggacgtgggcggccaggagaagctgcggccgctgtggaagtcctacagccgctgcacggacggcatcatctacgtggtggactcggtggacgtggaccggctggaggaggccaagacggagctgcacaaggtgaccaagttcgccgagaaccagggcacgccgctgctggtcatcgccaacaagcaggacctgcccaagtcgctgccggtggcagagattgagaagcagctggcgctgcacgagcttatcccggccaccacctatcacgtccagccggcgtgcgccatcatcggcgagggcctcaccgagggcatggacaagctctatgagatgatcctgaaacgcaggaagtccctcaagcagaagaagaagcggtaatgcgcccggagcgaccggggagcgagcgagtg

SEQ ID NO: 6242 - protein, 192 aa, Homo sapien
MGNISSNISAFQSLHIVMLGLDSAGKTTVLYRLKFNEFVNTVPTIGFNTEKIKLSNGTAKGISCHFWDVGGQEKLRPLWKSYSRCTDGIIYVVDSVDVDRLEEAKTELHKVTKFAENQGTPLLVIANKQDLPKSLPVAEIEKQLALHELIPATTYHVQPACAIIGEGLTEGMDKLYEMILKRRKSLKQKKKR

SEQ ID NO: 6243 - DNA, 900 bp, Homo sapien; identical to SEQ ID NO: 659

SEQ ID NO: 6244 - protein, 182 aa, Homo sapien; identical to SEQ ID NO: 660

SEQ ID NO: 6245 - DNA, 884 bp, Homo sapien; identical to SEQ ID NO: 611

SEQ ID NO: 6246 - protein, 201 aa, Homo sapien; identical to SEQ ID NO: 612

SEQ ID NO: 6247 - DNA, 1780 bp, Homo sapien
tgggggtacaactcggccgttgtcaccatgccggtcgtccggaagattttccgtcgccgccggggcgactcggagtcagaggaagatgagcaggactcagaggaggttcgattaaaactggaagagaccagagaggtacagaacttgaggaagaggcccaacggggtgagtgctgtggccttgctggtgggagagaaggtacaagaggagaccactctagtggatgatccctttcagatgaagacaggtggtatggtggatatgaagaaactgaaggaaaggggcaaagataagatcagtgaggaggaggacctgcacctggggacatcgttttctgcagaaaccaaccgaagggatgaggatgcagacatgatgaagtacattgagacagagctaaagaagaggaaagggatcgtggaacatgaggaacagaaagttaagccaaagaatgcagaggactgtctttatgaacttccagaaaacatccgtgtttcctcagcaaagaagaccgaggagatgctttccaaccagatgctgagtggcattcctgaggtggacctgggcatcgatgctaaaataaaaaatatcatttccacggaggatgccaaggcccgtctgctggcagagcagcagaacaagaagaaagacagcgagacctccttcgtgcctaccaacatggctgtgaattatgtgcagcacaacagattttatcatgaggagctcaacgcgcccatacggagaaacaaagaagagcccaaggcccggcccttgagagtaggcgacacggagaagccagagcctgagcggtcccctcctaaccgcaagcgtcctgctaacgagaaggcaactgatgactatcattatgagaagttcaagaaaatgaataggcggtactgagttgtgcacagtgggatgtaaatatcgccttcctctccctatatccctcccatgaaaaatggcttcctggccgggcgtggtggctcacgcctgtaatcccagcactttgggaggccgaggtgggcggatcacctgaggtcgggagtttgagaccagcctgaccaacatggagaaacccagtctctactgaaaatacagaaaagttagccaggcgtggtggcacatgcctgtaatcccagctgctcaggaggctgaggcaggagaattgcttgaacccaagaggcggaggttgtggtgagccgagattgcacctttgtactccagcctgggcaacgagcaaaaaactctgtctcaaagaaaaaaaaaaaagaaagaaaaagaaaaatggcttccaggacagagcatgctcatttgctggcggacagttccagaaacagaccctgttagtccttctacttacctgctggatttttcaagcactaaatttataactttttgcaacaaaataatgtgtaattttccatttgggggcaaactctattctggtgagcattattaaatcttgtttgtaaatatattgtctttctcttaatatttgctctgggtcaggaagaagctgttcacggtgtgataatactctttagattgtgctttcattattatagatgcatcatgtcttctgctttcacgtgtctgggatggggtcagaaatgcatcctccagctgacagaaaaatccaggatgagatcagaaggatactggtgttttctgacttttacaaaattacttgtttgttttcatttaaaaaaaagcataaactatgtttcttgttactattagaattattaaatttcaaaatgaatccaaaaaaaaaaaaaaaaaa

SEQ ID NO: 6248 - protein, 289 aa, Homo sapien
MPVVRKIFRRRRGDSESEEDEQDSEEVRLKLEETREVQNLRKRPNGVSAVALLVGEKVQEETTLVDDPFQMKTGGMVDMKKLKERGKDKISEEEDLHLGTSFSAETNRRDEDADMMKYIETELKKRKGIVEHEEQKVKPKNAEDCLYELPENIRVSSAKKTEEMLSNQMLSGIPEVDLGIDAKIKNIISTEDAKARLLAEQQNKKKDSETSFVPTNMAVNYVQHNRFYHEELNAPIRRNKEEPKARPLRVGDTEKPEPERSPPNRKRPANEKATDDYHYEKFKKMNRRY

SEQ ID NO: 6249 - DNA, 3432 bp, Homo sapien
  Unsure 2741: Unknown base
ctcgtcatgcgcaatgtggcgctgcggcgggcggcagggcctgtgtgtgctgaggcggctgagcggcggacatgcacaccacagagcgtggcgatggaacagtaaccgggcttgtgagagggctctgcagtataaactaggagacaagatccatggattcaccgtaaaccaggtgacatctgttcccgagctgttcctgactgcagtgaagctcacccatgatgacacaggagccaggtatttacacctggccagagaagacacgaataatctgttcagcgtgcagttccgtaccactcccatggacagtactggtgttcctcacattcttgagcataccgtcctttgtgggtctcaaaaatatccgtgcagaaaccctttcttcaaaatgttgaaccggtccctctccacgttcatgaacgccttcacagctagtgattatactctgtatccattttccacacaaaatcccaaggactttcagaatctcctctcggtgtatttggatgccaccttttccccatgtttacgcgagctggatttctggcaggaaggatggcggctggaacatgagaatccgagcgacccccagacgcccttggtctttaaaggagtcgtctttaatgagatgaagggagcgtttacagacaatgagaggatattctcccagcaccttcagaacagacttcttcccgaccacacgtactcagtggtctccgggggtgacccactgtgcatcccggagcttacatgggagcagcttaagcagtttcatgccactcactatcacccaagcaatgctaggttcttcacgtacggtaattttccattagaacagcatctgaaacaaattcacgaggaagcactgagcaaattccagaaaattgaaccaagcaccgtggtgccagctcagacaccctgggacaagcctagggaattccagataacatgtggcccggattcatttgctacagatccctctaaacaaacaaccgtcagcgttagcttcctcttaccggacatcaccgacacatttgaagccttcacattaagtcttctgtcttcactcttgacttctgggcccaattctcccttttacaaagccttgattgaatctggccttggcacagaattttctcctgatgttggatataatggctacacgagggaggcctactttagtgtcggcctccaagggattgtggagaaagacattgagaccgtcagaagcctcatagacagaacgattgatgaagtagttgagacaaggattgaagatgatcgaattgaggctttacttcataaaattgaaatacagatgaaacatcagtctaccagctttgggctgatgctgacatcatacatagcttcttgctggaaccatgatggggaccctgtggagctcttgaagttgggaaatcagttagctaaattcagacagtgcctgcaggaaaatccaaaatttttgcaagaaaaagtaaaacagtattttaagaataaccagcataagctgactttatcgatgaggccagatgacaagtatcacgagaagcaggcacaggtggaagccacgaagctcaagcagaaggtcgaggctctgtcccccggagacaggcagcagatctacgagaaaggtctagaattacggagtcaacaaagcaaacctcaagatgcctcttgtctgccagcgttgaaagtttccgatattgaacccaccatacctgtcacagagttggacgtggtcctgacagctggagatatccctgttcagtactgcgcccagcccaccaatggcatggtgtatttccgggccttctccagcctgaacacactccccgaggagctgaggccctatgtgcccctcttctgcagcatcctcaccaagctgggctgcggccttcttgactaccgggagcaggctcagcagatagaattgaagaccggagggatgagtgcttctccccacgtgctccccgacgactcacacatggacacctacgagcaggtaggtgtgcttttctcctctctctgcctggatcgaaacctgccagacatgatgcagctatggagtgaaatatttaacaacccgtgctttgaagaagaggagcacttcaaggtgctggtgaagatgaccgcccaggagctcgccaatggaattcctgactctgggcacctgtacgcatccatcagggcaggccggaccctcacgcccgcaggggacctgcaggagaccttcagcgggatggatcaggtgcggctgatgaagaggattgcagaaatgacagatatcaaacccatcctgaggaagctcccgcgtatcaagaaacacttgttaaatggtgataatatgaggtgttcagtgaatgcgactcctcagcagatgcctcagacagaaaaagcggtcgaagacttccttagaagcatcggtcggagtaaaaaggaacggaggcctgtgcgcccacacacggtcgagaaacctgtgcccagcagctctggtggagatgcccacgttccccatggctcccaggtcattaggaagctggtcatggaacccaccttcaagccctggcagatgaagactcacttcctgatgcccttcccggtgaattacgtgggtgaatgcatccgaactgtcccctacacggacccagatcatgccagtcttaaaatccttgcacgtttgatgactgccaaattcttgcatacagaaattcgagaaaaaggcggtgcttatggtggangcgcaaaactcagccacaatgggattttcaccctttactcttacagggacccaaatacaatagagacgctccagtcttttgggaaggctgtcgactgggctaagtctggaaaattcacacagcaagacatcgacgaagccaaactttctgtcttctcaaccgtagatgctcctgtcgctccttcagacaaaggaatggaccacttcttgtacggcctctcggatgagatgaagcaggcccacagagagcagctctttgctgtcagccacgacaagctcctggccgtgagcgataggtacctcggcactgggaagagcacacacggcctggccatcctcggacccgagaacccgaaaattgccaaggacccatcctggatcatccgatgagcagccgtggcgctcgactgcacaggagcccgagacaatacacctccaagctgaatatgaaaagtcagaaatgctactgctttttccaagaatattatgtcattgagtgtcgccaaagcccttgactggcgagtcaaaaactcagatctatcttaagagtgaccaggaagaggttcattgaaataatcatgcatgaagcgccaaagatgcaccatgtagaattttcactttgtactggcaggctcgttttacctgattctagaatatttaagaatctaaaaataaagggcaactctgactta

SEQ ID NO: 6250 - protein, 1038 aa, Homo sapien
  unsure 910: unknown amino acid
  Unsure 2741: Unknown amino acid
MWRCGGRQGLCVLRRLSGGHAHHRAWRWNSNRACERALQYKLGDKIHGFTVNQVTSVPELFLTAVKLTHDDTGARYLHLAREDTNNLFSVQFRTTPMDSTGVPHILEHTVLCGSQKYPCRNPFFKMLNRSLSTFMNAFTASDYTLYPFSTQNPKDFQNLLSVYLDATFSPCLRELDFWQEGWRLEHENPSDPQTPLVFKGVVFNEMKGAFTDNERIFSQHLQNRLLPDHTYSVVSGGDPLCIPELTWEQLKQFHATHYHPSNARFFTYGNFPLEQHLKQIHEEALSKFQKIEPSTVVPAQTPWDKPREFQITCGPDSFATDPSKQTTVSVSFLLPDITDTFEAFTLSLLSSLLTSGPNSPFYKALIESGLGTEFSPDVGYNGYTREAYFSVGLQGIVEKDIETVRSLIDRTIDEVVETRIEDDRIEALLHKIEIQMKHQSTSFGLMLTSYIASCWNHDGDPVELLKLGNQLAKFRQCLQENPKFLQEKVKQYFKNNQHKLTLSMRPDDKYHEKQAQVEATKLKQKVEALSPGDRQQIYEKGLELRSQQSKPQDASCLPALKVSDIEPTIPVTELDVVLTAGDIPVQYCAQPTNGMVYFRAFSSLNTLPEELRPYVPLFCSILTKLGCGLLDYREQAQQIELKTGGMSASPHVLPDDSHMDTYEQVGVLFSSLCLDRNLPDMMQLWSEIFNNPCFEEEEHFKVLVKMTAQELANGIPDSGHLYASIRAGRTLTPAGDLQETFSGMDQVRLMKRIAEMTDIKPILRKLPRIKKHLLNGDNMRCSVNATPQQMPQTEKAVEDFLRSIGRSKKERRPVRPHTVEKPVPSSSGGDAHVPHGSQVIRKLVMEPTFKPWQMKTHFLMPFPVNYVGECIRTVPYTDPDHASLKILARLMTAKFLHTEIREKGGAYGGXAKLSHNGIFTLYSYRDPNTIETLQSFGKAVDWAKSGKFTQQDIDEAKLSVFSTVDAPVAPSDKGMDHFLYGLSDEMKQAHREQLFAVSHDKLLAVSDRYLGTGKSTHGLAILGPENPKIAKDPSWIIR

SEQ ID NO: 6251 - DNA, 3159 bp, Homo sapien
atggctgggatggacagtggcaacctgaagaccgcgaggctgtggcgggacgccgccctgcgtgccaggaagctgcggagcaacctgcgccagctcacgctcaccgccgccggggcctgccccggggccggggccgacgcgctcgagtcccccgcctccccccagctcgtgctgccggccaacctcggggacattgaggcactgaacctggggaacaacggcctggaggaggtacccgaggggctggggtcggcgctgggcagcctgcgcgtcctggtcctgcgcaggaaccgcttcgcccggctgcccccggcggtggccgagctcggccaccacctcaccgagctggacgtgagccacaaccggctgaccgccctgggcgcggaggtggtgagtgctctgagggagctgcggaagctcaacctcagccacaaccagctgcccgccctgcccgcccagctgggcgctctcgctcacctggaggagctggatgtcagctttaaccggctggcgcacctgcctgactccctctcctgcctctcccgcctgcgcaccctggacgtggatcacaaccagctcactgccttcccccggcagctgctgcagctggtggccctggaggagctggacgtgtccagcaaccggctgcggggcctgcctgaggatatcagtgccctgcgtgccctcaagatcctctggctgagtggggccgagcttggcacgctgcccgccggcttctgcgagctggccagtttggagagcctcatgctagacaacaacgggctgcaggctctgcccgcccagttcagctgcctgcagcggctcaaaatgctcaacctgtcctccaacctcttcgaggagttccctgccgcgctgctgcccctggctggtctggaggagctctaccttagtcgcaaccagctcacctcggtgccatcccttatctcgggcctgggccggcttctcaccttgtggctggataataaccgcatccgctacctgccggactccatcgtggagctgaccggcctggaggagctcgtgctgcaggggaaccagatcgcggtgctgcccgaccactttggccagctctcccgggtgggtttgtggaagatcaaagacaacccactgatccagcccccctacgaggtctgcatgaaggggatcccctacatcgcagcctaccagaaggaactggctcattcccagccggcggtgcagccccggctcaagctgctcctgatggggcataaggctgcaggaaagactttgctgcgccactgcctcaccgaggagagagtggagggatgcccaggaggaggggacaaggagaagtgctacccaccgtcacctccccctgtgagcaagggcatcgaggtgaccagctggacggccgatgcctcccggggcctgcggttcatcgtgtatgacttagctggggatgaaagttatgaggtgatccagcccttcttcctgtccccaggggccctatacgtgctggtggtcaacttggccacctatgagcctcgccactttcctaccaccgtgggctccttcttgcatcgggtcggggcgagagtgcccaacgcggtggtgtgcatcgtgggcacccacgcagacctgtgcggagagcgtgagctggaggagaaatgtctggacattcaccgccagatcgccctgcaggagaagcacgacgcggagggactgagccgcttggccaaggtggtggacgaggcactggcccgggacttcgagctgcgctctgccagcccccacgcagcctactatggcgtttcggacaagaaccttcgacggcgcaaggcccattttcaatacctgctcaaccaccggctgcagatcctctcccccgtgttgcctgttagctgcagggacccgcgccacttacgacgccttcgggacaagttgctgtcagttgctgagcaccgagagatcttccccaacttacacagagtactgcctcgatcctggcaggtgctggaggaactgcatttccagccacctcaggcccagcgactgtggctaagctggtgggactcggcgcgcttgggcctgcaggcgggtctgaccgaggaccgactgcagagtgccctctcctacctgcatgagagcggcaagctactctactttgaggacagtccggctctcaaggagcacgtcttccacaacctcacccgcctcatcgacatcctcaatgtcttcttccagagggatccctctttgctgctgcataagctgctcctagggaccagtggagagggcaaggcggagggggaaagctccccgcccatggcgcggtccacccccagccaggaactgctccgggccacccagctccatcagtatgtggagggctttctgttgcatgggctcttgccagctcatgtcattcggttgctgcttaagcctcatgtccaggcccagcaggacttgcagctgttgctggagctgctggagaagatgggactctgttactgcctcaataaacccaagggcaagcctttgaatgggtccacagcttggtacaagttcccatgctatgtgcagaacgaggtgccccatgcagaagcctggattaatgggaccaacctagctgggcagtcttttgtggctgagcagttgcagattgaatatagctttccttttacttttccacctgggttgtttgcacgctacagtgtccagatcaacagccatgtggtgcacaggtcggatggtaaatttcagatctttgcctatagagggaaagttcctgtggttgtgagttacagacctgccaggggagtcctgcagccagacaccctgtccattgctagccatgcatcattaccaaatatatggaccgcatggcaagccataacccccttggtggaggaactgaatgtcctacttcaggaatggcctggactgcactacaccgtgcacattctctgttctaagtgccttaagagaggatcgcccaatccacatgcttttccaggggagttgctgagtcagcccagaccggaaggagtggcagagatcatttgccccaagaacggcagcgagcgagtaaatgttgccttggtttacccacccacgccgactgtgatcagcccctgttccaagaagaatgttggtgaaaagcacagaaaccagtga

SEQ ID NO: 6252 - protein, 1052 aa, Homo sapien
MAGMDSGNLKTARLWRDAALRARKLRSNLRQLTLTAAGACPGAGADALESPASPQLVLPANLGDIEALNLGNNGLEEVPEGLGSALGSLRVLVLRRNRFARLPPAVAELGHHLTELDVSHNRLTALGAEVVSALRELRKLNLSHNQLPALPAQLGALAHLEELDVSFNRLAHLPDSLSCLSRLRTLDVDHNQLTAFPRQLLQLVALEELDVSSNRLRGLPEDISALRALKILWLSGAELGTLPAGFCELASLESLMLDNNGLQALPAQFSCLQRLKMLNLSSNLFEEFPAALLPLAGLEELYLSRNQLTSVPSLISGLGRLLTLWLDNNRIRYLPDSIVELTGLEELVLQGNQIAVLPDHFGQLSRVGLWKIKDNPLIQPPYEVCMKGIPYIAAYQKELAHSQPAVQPRLKLLLMGHKAAGKTLLRHCLTEERVEGCPGGGDKEKCYPPSPPPVSKGIEVTSWTADASRGLRFIVYDLAGDESYEVIQPFFLSPGALYVLVVNLATYEPRHFPTTVGSFLHRVGARVPNAVVCIVGTHADLCGERELEEKCLDIHRQIALQEKHDAEGLSRLAKVVDEALARDFELRSASPHAAYYGVSDKNLRRRKAHFQYLLNHRLQILSPVLPVSCRDPRHLRRLRDKLLSVAEHREIFPNLHRVLPRSWQVLEELHFQPPQAQRLWLSWWDSARLGLQAGLTEDRLQSALSYLHESGKLLYFEDSPALKEHVFHNLTRLIDILNVFFQRDPSLLLHKLLLGTSGEGKAEGESSPPMARSTPSQELLRATQLHQYVEGFLLHGLLPAHVIRLLLKPHVQAQQDLQLLLELLEKMGLCYCLNKPKGKPLNGSTAWYKFPCYVQNEVPHAEAWINGTNLAGQSFVAEQLQIEYSFPFTFPPGLFARYSVQINSHVVHRSDGKFQIFAYRGKVPVVVSYRPARGVLQPDTLSIASHASLPNIWTAWQAITPLVEELNVLLQEWPGLHYTVHILCSKCLKRGSPNPHAFPGELLSQPRPEGVAEIICPKNGSERVNVALVYPPTPTVISPCSKKNVGEKHRNQ

SEQ ID NO: 6253 - DNA, 2058 bp, Homo sapien; identical to SEQ ID NO: 3239

SEQ ID NO: 6254 - protein, 332 aa, Homo sapien; identical to SEQ ID NO: 3240

SEQ ID NO: 6255 - DNA, 5338 bp, Homo sapien; identical to SEQ ID NO: 2766

SEQ ID NO: 6256 - DNA, 4152 bp, Homo sapien; identical to SEQ ID NO: 2415

SEQ ID NO: 6257 - protein, 355 aa, Homo sapien; identical to SEQ ID NO: 2416

SEQ ID NO: 6258 - DNA, 3604 bp, Homo sapien
aagaggctaacctctgctttgtggacattgacaaccacttcattgagttgccagaggacttgccacagttccccaacaaattggagtttgtccaggaagtctctgagattctcatggcatttggaattccccctgaagggaatcttcattgcagtgagagtgcctccaagctgaagaggctgcgggcctctgagcttgtctcggacaagaggaatgggaacattgctggctcccctttgcattcctacgagcttcttaaggagaatgaaactattgcccggctgcaagccttggtcaagagaactggggtgagcctggaaaagttggaagtgcgtgaagaccccagcagcaataaggatctcaaagttcagtgtgatgaagaagaactcaggatttaccagctaaacattcagatccgggaagtttttgcaaatcgtttcactcagatgtttgcagattatgaggtgtttgtcatccaacccagccaggataaggaatcctggtttaccaacagggagcaaatgcaaaactttgataaagcatcttttctgtcagatcagcctgagccctacctgcccttcctctcaagattcctggagacccagatgtttgcatctttcattgacaacaaaataatgtgtcatgatgatgatgatgaagaccctgtactccgggtatttgattcccgagttgacaagatcaggctgttgaatgttcggacacctactctccgtacatccatgtaccagaagtgtaccactgtggatgaagcagagaaagcaattgagctgcgtctggcaaaaattgaccatactgcaattcacccacatttacttgacatgaagattggacaagggaaatatgagccgggcttcttccctaagctgcagtctgatgtactttccactgggccagccagcaacaagtggacgaaaaggaatgcccctgcccagtggaggcggaaagatcggcagaagcagcacacagaacacctgcgtttagataatgaccagagggagaagtacatccaggaagccaggactatgggcagcactatccgccagcccaaactgtccaacctctctccatcagtgattgcccagaccaattggaagtttgtagagggcctgctgaaggaatgccgcaataagaccaagaggatgctggtggaaaagatgggccgagaagctgtggagctagggcatggggaggtgaacatcacaggggtggaagagaacaccctgattgccagcctttgtgatctcctggaaaggatctggagtcatggactacaagtgaaacaggggaaatcagccttatggtcccacctgttacattatcaggacaaccggcagagaaaactcacatcaggaagcctcagtacctcaggaatacttcttgattcagaacgtaggaagtctgatgccagctcactcatgcctcccctgaggatctccctgattcaggatatgaggcacatccagaacatcggggaaatcaagactgatgtgggaaaggccagagcatgggtgcgactgtccatggaaaaaaagttactttccagacacctgaagcagctcctctcagaccatgagctcaccaaaaagttatataagcgctatgccttcctgcgctgtgatgacgagaaggagcagttcctctatcacctcctgtctttcaatgccgtcgattacttttgcttcaccaatgtcttcacaactatcctgatcccgtaccacattctgatcgtaccaagcaagaagctggggggctccatgttcactgccaacccatggatctgtatatcaggagaattgggtgagacacagatcatgcagattcccaggaatgtgctagagatgaccttcgagtgccagaacttggggaagcttactactgtccagattggccatgataactctgggctgtatgccaaatggctggtggagtatgtgatggtcaggaatgagatcacaggacatacctacaagttcccgtgtggccggtggttagggaagggcatggatgatggaagcctggagcggatcctagttggggagctgctcacatcccagcctgaggtggatgagaggccatgccggaccccgccgctgcagcagtcccccagtgtcatccggaggcttgttaccatctcacccaacaacgagcccaagctgaacactgggcagatccaggagtccatcggggaggcagtcaatggcattgtgaagcacttccataagcctgagaaagagcgaggcagtctgacgctgttgctctgtggagagtgtggccttgtctcggccttggaacaggctttccagcatggatttaaatcgccccggctcttcaaaaatgtcttcatttgggatttcctggaaaaagcacaaacctattatgagacattagagaagaatgaagtagtccctgaggaaaactggcatacaagagcccggaacttctgccgatttgtcactgcaatcaacaatactccccggaacatcggcaaggatggcaagtttcagatgctggtgtgcttgggagccagagatcacctcctacaccactggattgccctgctggctgactgccccatcactgcacacatgtatgaggatgtggcactgatcaaagaccatacacttgtcaattccttgattcgtgtgctgcagacattgcaggagttcaacatcacgctggagacgtcccttgtcaagggcatcgacatctgacctcccagcaccagccagcagcaggactgagaaagactcaccctgcagctctgaccttttttcccaaagggacttaagcgattgtgcaggagtaggagacaaaatgtacactcactgtaaaaagaaaactagaggatttttggaataaataatctattttagagtttatttgctgatttgctttttacacactttcatgtgaaagagtgatagggagagggagcgaggctggtgccgcttattttgaagctggtgccctccctcgccgtggccacatgctggaagcctgaggcctccctggactgagcctgtggcactgcgtgcgggacagttatgtttccttgccccgtcgcattaatgaggcccttccacatcatttttaaactaatgtttttctatattaacattattatggatatttggctttcataggccacacacaggtgtgctgcgcgggaagccccatgctccaatcaaagggatttttagtagtgcctctaagcaagcaccgatgagtcagtcccacgtattttcttttttgtcagtattgtttgggaaggagacatgccgggatgtgtcatcgtgccaaataccacatttcctgttggcacagtttcacagaagtaaacataagcatgttttaacaggtttttcttttcttttttcttttttaaaatgttttatttatttaacccgccattgtgtgtttttaagtattttctttttttaaggaaaggaaaagcttgtcacaatctaactggctatgttattattattaaatttatgttttgcaacttagaaaccagctacagtatggcccacttaataaaacacctgaaacaaaaaaaaaaaaaaaaaaaaaaaaaaaaaaa

SEQ ID NO: 6259 - protein, 872 aa, Homo sapien
MAFGIPPEGNLHCSESASKLKRLRASELVSDKRNGNIAGSPLHSYELLKENETIARLQALVKRTGVSLEKLEVREDPSSNKDLKVQCDEEELRIYQLNIQIREVFANRFTQMFADYEVFVIQPSQDKESWFTNREQMQNFDKASFLSDQPEPYLPFLSRFLETQMFASFIDNKIMCHDDDDEDPVLRVFDSRVDKIRLLNVRTPTLRTSMYQKCTTVDEAEKAIELRLAKIDHTAIHPHLLDMKIGQGKYEPGFFPKLQSDVLSTGPASNKWTKRNAPAQWRRKDRQKQHTEHLRLDNDQREKYIQEARTMGSTIRQPKLSNLSPSVIAQTNWKFVEGLLKECRNKTKRMLVEKMGREAVELGHGEVNITGVEENTLIASLCDLLERIWSHGLQVKQGKSALWSHLLHYQDNRQRKLTSGSLSTSGILLDSERRKSDASSLMPPLRISLIQDMRHIQNIGEIKTDVGKARAWVRLSMEKKLLSRHLKQLLSDHELTKKLYKRYAFLRCDDEKEQFLYHLLSFNAVDYFCFTNVFTTILIPYHILIVPSKKLGGSMFTANPWICISGELGETQIMQIPRNVLEMTFECQNLGKLTTVQIGHDNSGLYAKWLVEYVMVRNEITGHTYKFPCGRWLGKGMDDGSLERILVGELLTSQPEVDERPCRTPPLQQSPSVIRRLVTISPNNEPKLNTGQIQESIGEAVNGIVKHFHKPEKERGSLTLLLCGECGLVSALEQAFQHGFKSPRLFKNVFIWDFLEKAQTYYETLEKNEVVPEENWHTRARNFCRFVTAINNTPRNIGKDGKFQMLVCLGARDHLLHHWIALLADCPITAHMYEDVALIKDHTLVNSLIRVLQTLQEFNITLETSLVKGIDI

SEQ ID NO: 6260 - DNA, 4572 bp, Homo sapien; identical to SEQ ID NO: 2092

SEQ ID NO: 6261 - protein, 695 aa, Homo sapien; identical to SEQ ID NO: 2093

SEQ ID NO: 6262 - DNA, 873 bp, Homo sapien; identical to SEQ ID NO: 1085

SEQ ID NO: 6263 - protein, 161 aa, Homo sapien; identical to SEQ ID NO: 1086

SEQ ID NO: 6264 - DNA, 4357 bp, Homo sapien
atagtcaccagaagctggaagagtcaaaggacacattctcccctcaagccccagtgggagcacggcccagctggattttggacttctggcctccagaactagacagggcctcacggtgtcacccagggtggaatacagtggtgtgatcatagctcactgcagcctggaattcctgggctcaagcaaccctgccacctcagccttccaagtagctaggactacagaacatccatgatagcagtcttctgtaaatcgaacttttcaagaattctctgaaggaaccaagtaggatattcttacatcatgacttaatgtgaatgcaagaacaagaaataggttttatctctaaatataatgaagggctgtgtgtaaacactgaccctgtctcaattctaacaagcattttagacatgagtttacatcggcaaatgggttcagatcgagatcttcagtcctctgcttcatctgtgagcttgccttcagtcaaaaaggcacccaaaaaaagaagaatttcaataggctccctgtttcggaggaaaaaagataacaaacgtaaatcaagggagctaaatggcggggtggatggaattgcaagtattgaaagtatacattctgaaatgtgtactgataagaactccattttctctacaaatacctcttctgacaatggattaacttccatcagcaaacaaattggagacttcatagagtgccctttgtgccttttgcggcattctaaagacagatttcctgatataatgacttgtcatcacagatcttgtgtggattgcttacgacaatatttaaggatagaaatctctgaaagcagagttaatattagttgcccagaatgtactgagcggtttaatccccatgatattcgcttgatattaagtgatgatgtcttgatggaaaaatacgaagaatttatgcttagacggtggcttgttgcagatcctgattgtaggtggtgtccagctccagactgtggatatgctgtgatagcatttggatgtgccagctgtccaaaattaacttgtgggcgagagggctgtggaacagagttttgctaccactgtaaacagatttggcaccccaaccagacctgtgatgctgctcgacaagagagagcccagagcttacgtttgagaactatacgttcttcatccattagttatagtcaagagtctggagcagcagctgatgatataaagccatgtccacgatgtgctgcttatataataaagatgaatgatgggagctgcaatcacatgacatgtgctgtttgtggttgtgagttttgttggttgtgtatgaaagaaatctcagatttgcattatctaagtccatcaggatgtactttttgggggaagaaaccctggagccgaaagaagaaaatattgtggcaactgggaacactggttggtgctcctgtcggaatcgctttaatagctggcattgctattcctgcaatgattattggcattcctgtgtatgtgggccgcaagattcacaatcgctatgaaggcaaggatgtttcaaagcacaaacggaatttggccatagcaggtggtgtaacgttgtctgtaatcgtgtctccagtagtagctgcagtgactgtaggtatcggtgttcctattatgttagcttatgtctatggcgtagttccaatttctctttgtcgaagcggaggttgtggagtctcagcaggcaatggaaaaggagttaggattgaatttgatgatgaaaatgatataaatgttggtggaactaacacagctgtagacacaacatcagtagcagaagcaagacacaacccaagcataggggagggaagtgttggtgggctgactggcagtttgagtgcaagtggaagccacatggatcgaataggagccatccgagacaacctgagtgaaacggccagcaccatggcactagctggagccagtataacggggagtctgtcaggaagtgccatggtaaactgttttaacaggttggaagtacaagcagatgtacagaaagaacggtacagtctaagtggagaatctggcacagtcagcttgggaacagttagtgataatgccagcaccaaagcaatggcaggatccattctgaattcctacatcccattggacaaagaaggcaacagtatggaggtgcaagtagatattgagtcaaagccatccaaattcaggcacaacagtggaagcagtagtgtggatgatggcagtgccacccgaagttatgctggcggttcatccagtggcttgcctgaaggtaaatctagtgccaccaagtggtccaaagaagcaacagcagggaaaaaatcaaaaagtggtaaactgaggaaaaagggtaacatgaagataaatgagacgagagaggacatggatgcacagttgttagaacaacaaagcacgaactcaagtgaatttgaggctccatccctcagtgacagtatgccttctgtagcagattctcactctagtcatttttctgaatttagttgttctgacctagaaagcatgaaaacttcttgtagtcatggttccagtgattatcacacccgctttgctactgttaacattcttcctgaggtagaaaatgaccgtctggaaaattccccacatcagtgtagcatttctgtggttacccaaactgcttcctgttcagaagtttcacagttgaatcatattgctgaagaacatggtaacaatggaataaaacctaatgttgatttatattttggcgatgcactaaaagaaacaaataacaaccactcacatcagacaatggaattaaaagttgcaattcagactgaaatttaggcccataaatgctgcagaataattaccactgtacaaccgtgtttggagctggttgaactacatgtgactacttaagtttcaggttaccagcaaaagccgggtttcattatcataatgcagatacattttctgtgttcagcaaggcattgtgtgtcatgtggatcttagttaccaaactatgaagtgaaggctttaaaagtgcattattttaaggataataaatttgaagagcaaagcatgttttgtgtgtttgccacaaaacattgcttgaagcacatacttagatagaaattggtcttaatttatataatcaatataaaatactaatgcaattctacagcattcaaatgaagaaaacttgaggctttagggataagtggttagtgatattttattgaaaccactaaagagataagtttaaaagaactgcataggttactctcagtatatgatactctgtaacatttctatttatatcggcataaatttcattttttttcttcatatgcaatgtggttatataaagcttaatgcagctcatttgctaccatttggatacttagacactttgagcaagattgtggcagtttttgcacaactttgaaatagaaatacctggtactctatcttgtttattgttgatgccatcttagaggaaaaaatgtaaaggtaagtaattaagcatatgacagcaacaaataagatacataaaactacaaaataaagtcccattaggttataagtattacaaaaaatccacctttctctaaggggaagtttgtaccccattgattcttggtgcctttgggatcgactgggttttaatggcctagttatttgaggattttgctgtgttgttttccatgtcttctctggtcaccttggattatatataaaaatacaggaaatagataaacatgaatgtgattaataatgctgaaaaagtattagcctaccaaagacacactcaggctttagtgaataactttacataacctcagtttttaacacatgcatatcttctccaaccatgaaatcaaagcacggtgcagaacttgtaccaagtacaaaaggtccatgtatgattagcattattttcttttgcttttgtttatggacaatgttcagctgacataagcagaagttggccaaaatactgcctgtactgttaatttcctgtataattcacttaaataaaagcaggttaacctcaatgatagcagttaaaatgttctatcttatgtatttcttttaagtattaccattatggtgctactgagcgttttcttttggtaaaaagaaaaatgccatgggctgcagtcttcttccatcacttttccctaccaggtccattaatatgcttataacactagtgccagttattttatttgataatgcttatggtatttgtatatttgtttgcattccaattttgtttaataatgagtgtgtaaactgcatacgttaaataaatgtaaatactaatgtactgctgcaaaaaaaaaaaaaaaaaaaaaaaaaaa

SEQ ID NO: 6265 - protein, 838 aa, Homo sapien
MQEQEIGFISKYNEGLCVNTDPVSILTSILDMSLHRQMGSDRDLQSSASSVSLPSVKKAPKKRRISIGSLFRRKKDNKRKSRELNGGVDGIASIESIHSEMCTDKNSIFSTNTSSDNGLTSISKQIGDFIECPLCLLRHSKDRFPDIMTCHHRSCVDCLRQYLRIEISESRVNISCPECTERFNPHDIRLILSDDVLMEKYEEFMLRRWLVADPDCRWCPAPDCGYAVIAFGCASCPKLTCGREGCGTEFCYHCKQIWHPNQTCDAARQERAQSLRLRTIRSSSISYSQESGAAADDIKPCPRCAAYIIKMNDGSCNHMTCAVCGCEFCWLCMKEISDLHYLSPSGCTFWGKKPWSRKKKILWQLGTLVGAPVGIALIAGIAIPAMIIGIPVYVGRKIHNRYEGKDVSKHKRNLAIAGGVTLSVIVSPVVAAVTVGIGVPIMLAYVYGVVPISLCRSGGCGVSAGNGKGVRIEFDDENDINVGGTNTAVDTTSVAEARHNPSIGEGSVGGLTGSLSASGSHMDRIGAIRDNLSETASTMALAGASITGSLSGSAMVNCFNRLEVQADVQKERYSLSGESGTVSLGTVSDNASTKAMAGSILNSYIPLDKEGNSMEVQVDIESKPSKFRHNSGSSSVDDGSATRSYAGGSSSGLPEGKSSATKWSKEATAGKKSKSGKLRKKGNMKINETREDMDAQLLEQQSTNSSEFEAPSLSDSMPSVADSHSSHFSEFSCSDLESMKTSCSHGSSDYHTRFATVNILPEVENDRLENSPHQCSISVVTQTASCSEVSQLNHIAEEHGNNGIKPNVDLYFGDALKETNNNHSHQTMELKVAIQTEI

SEQ ID NO: 6266 - DNA, 2665 bp, Homo sapien; identical to SEQ ID NO: 983

SEQ ID NO: 6267 - protein, 276 aa, Homo sapien; identical to SEQ ID NO: 984

SEQ ID NO: 6268 - DNA, 1467 bp, Homo sapien
  Unsure 11, 26, 39, 44, 55, 57, 93, 97, 103, 133, 185: Unknown base
cgtgaaatgancggttcggtcgacantgctgtcttctcntaacnagctttgtaantnttcttggaggagcttgcctgggggtgggatgccacngagngccttnagtgtttccccatgttcctggagtgttttngcccttcccttgtgggatggacagatagaggcacccgacttctaccactaanacttagagcttctattgatggtgggtggagaggatgtgtaggatggtgatctgaatgtttccacttccaaaagtagaccactagggtgtcactgaaaaggtttacagaactttgtgtcacatgcagcatttaacccaaaatatccttacaggtcctgaaaaaggcttgcttgactgtggacctttaccagatttccttctgggagagtcatagctttgttagtggatggtatctgtgagctttcattctctttctttctaggacagtgataccaccaagaagaagaagaagaagaagaaagcaaaagaggtagaattggtttctgagtagtgaaggccacttgaagctggaggagaaactaaagccttattgagaaaacatgttatagatccttttgttgctgagagagtggaacataggtcctagacagggtgaagagttctggcacattttagctgctactttgagacctcggtgatgttacctggtgtggtcatcccatcttgtcctgttttaaggatatgggtggtgaaagatgaaagaggcagagtttatcccaatgacttctctgtttgagttgggaagcctcaccttcagacccagtaactgtccgcagctgtctgctagtggttgtcttaacatcgtagtcctagtttgcattttttaaatcccctctgtttaaaaggtttgtaaaacaaaaacaaaaaactaagtctgctcagtgaaatgctgtagaaccctaaataagtggtagaagagtgtcactgaattttgtctctgaattcagtataactgagttttgtccatgctggtgtctgggttataggcctgatgggcctggtagttttccatcttgttctggcctagaggtcagtcctttgcacttcctcaaagcttgtgtacagtgctcacctaaatccatctgactacttgttcctgtgccctcttgttttaggcctcgtttacttttaaaaaatgaaattgttcattgctgggagaagaatgttgtaatttttacttattaaagtcaacttgttaagttttttatgtattcctgttgggttttcttgttgatctcatgctagcagagcaaaaattgtaaaatattttgattaaaaatctagggacctttatgtcctatttgaaatgtgatgctttatgttgtttctggttttacattttgtctgtatcctacacaatcacttgggccctgtcatctgatgtgagatcaagtactcagaggcagtgattaccacaaaaccactgatctctagaagaacaa

SEQ ID NO: 6269 - DNA, 6550 bp, Homo sapien; identical to SEQ ID NO: 2756

SEQ ID NO: 6270 - protein, 1426 aa, Homo sapien; identical to SEQ ID NO: 2757

SEQ ID NO: 6271 - DNA, 5117 bp, Homo sapien
aattcggcacgagggggggcagcagcggacgccgctaacggcctccctcggcgctgacaggctgggccggcgcccggctcgcttgggtgttcgcgtcgccacttcggcttctcggccggtcgggcccctcggcccgggcttgcggcgcgcgtcggggctgagggctgctgcggcgcagggagaggcctggtcctcgctgccgagggatgtgagtgggagctgagcccacactggagggcccccgagggcccagcctggaggtcgttcagagccgtgcccgccccggggcttcgcagaccttgacccgccgggtaggagccgcccctgcgggctcgagggcgcgctctggtcgcccgatctgtgtagccggtttcagaagcaggcaacaggaacaagatgtgaactgtttctcttctgcagaaaaagaggctcttcctcctcctcccgcgacggcaaatgttctgaaaaagactctgcatgggaatggcctgccttacgatgacagaaatggagggaacatccacctcttctatatatcagaatggtgatatttctggaaatgccaattctatgaagcaaatagatccagttcttcaggtgtatctttaccattcccttgggaaatctgaggcagattatctgacctttccatctggggagtatgttgcagaagaaatctgtattgctgcttctaaagcttgtggtatcacacctgtgtatcataatatgtttgctttaatgagtgaaacagaaaggatctggtatccacccaaccatgtcttccatatagatgagtcaaccaggcataatgtactctacagaataagattttactttcctcgttggtattgcagtggcagcaacagagcctatcggcatggaatatctcgaggtgctgaagctcctcttcttgatgactttgtcatgtcttacctctttgctcagtggcggcatgattttgtgcacggatggataaaagtacctgtgactcatgaaacacaggaagaatgtcttgggatggcagtgttagatatgatgagaatagccaaagaaaacgatcaaaccccactggccatctataactctatcagctacaagacattcttaccaaaatgtattcgagcaaagatccaagactatcatattttgacaaggaagcgaataaggtacagatttcgcagatttattcagcaattcagccaatgcaaagccactgccagaaacttgaaacttaagtatcttataaatctggaaactctgcagtctgccttctacacagagaaatttgaagtaaaagaacctggaagtggtccttcaggtgaggagatttttgcaaccattataataactggaaacggtggaattcagtggtcaagagggaaacataaagaaagtgagacactgacagaacaggatttacagttatattgcgatttttctaatattattgatgtcagtattaagcaagcaaaccaagagggttcaaatgaaagccgagttgtaactatccataagcaagatggtaaaaatctggaaattgaacttagctcattaagggaagctttgtctttcgtgtcattaattgatggatattatagattaactgcagatgcacatcattacctctgtaaagaagtagcacctccagccgtgcttgaaaatatacaaagcaactgtcatggcccaatttcgatggattttgccattagtaaactgaagaaagcaggtaatcagactggactgtatgtacttcgatgcagtcctaaggactttaataaatattttttgacttttgctgtcgagcgagaaaatgtcattgaatataaacactgtttgattacaaaaaatgagaatgaagagtacaacctcagtgggacaaagaagaacttcagcagtcttaaagatcttttgaattgttaccagatggaaactgttcgctcagacaatataattttccagtttactaaatgctgtcccccaaagccaaaagataaatcaaaccttctagtcttcagaacgaatggtgtttctgatgtaccaacctcaccaacattacagaggcctactcatatgaaccaaatggtgtttcacaaaatcagaaatgaagatttgatatttaatgaaagccttggccaaggcacttttacaaagatttttaaaggcgtacgaagagaagtaggagactacggtcaactgcatgaaacagaagttcttttaaaagttctggataaagcacacagaaactattcagagtctttctttgaagcagcaagtatgatgagcaagctttctcacaagcatttggttttaaattatggagtatgtgtctgtggagacgagaatattctggttcaggagtttgtaaaatttggatcactagatacatatctgaaaaagaataaaaattgtataaatatattatggaaacttgaagttgctaaacagttggcatgggccatgcattttctagaagaaaacacccttattcatgggaatgtatgtgccaaaaatattctgcttatcagagaagaagacaggaagacaggaaatcctcctttcatcaaacttagtgatcctggcattagtattacagttttgccaaaggacattcttcaggagagaataccatgggtaccacctgaatgcattgaaaatcctaaaaatttaaatttggcaacagacaaatggagttttggtaccactttgtgggaaatctgcagtggaggagataaacctctaagtgctctggattctcaaagaaagctacaattttatgaagataggcatcagcttcctgcaccaaagtgggcagaattagcaaaccttataaataattgtatggattatgaaccagatttcaggccttctttcagagccatcatacgagatcttaacagtttgtttactccagattatgaactattaacagaaaatgacatgttaccaaatatgaggataggtgccctggggttttctggtgcctttgaagaccgggatcctacacagtttgaagagagacatttgaaatttctacagcaacttggcaagggtaattttgggagtgtggagatgtgccggtatgaccctctacaggacaacactggggaggtggtcgctgtaaaaaagcttcagcatagtactgaagagcacctaagagactttgaaagggaaattgaaatcctgaaatccctacagcatgacaacattgtaaagtacaagggagtgtgctacagtgctggtcggcgtaatctaaaattaattatggaatatttaccatatggaagtttacgagactatcttcaaaaacataaagaacggatagatcacataaaacttctgcagtacacatctcagatatgcaagggtatggagtatcttggtacaaaaaggtatatccacagggatctggcaacgagaaatatattggtggagaacgagaacagagttaaaattggagattttgggttaaccaaagtcttgccacaagacaaagaatactataaagtaaaagaacctggtgaaagtcccatattctggtatgctccagaatcactgacagagagcaagttttctgtggcctcagatgtttggagctttggagtggttctgtatgaacttttcacatacattgagaagagtaaaagtccaccagcggaatttatgcgtatgattggcaatgacaaacaaggacagatgatcgtgttccatttgatagaacttttgaagaataatggaagattaccaagaccagatggatgcccagatgagatctatatgatcatgacagaatgctggaacaataatgtaaatcaacgcccctcctttagggatctagctcttcgagtggatcaaataagggataacatggctggatgaaagaaatgaccttcattctgagaccaaagtagatttacagaacaaagttttatatttcacattgctgtggactattattacatatatcattattatataaatcatgatgctagccagcaaagatgtgaaaatatctgctcaaaactttcaaagtttagtaagtttttcttcatgaggccaccagtaaaagacattaatgagaattccttagcaaggattttgtaagaagtttcttaaacattgtcagttaacatcactcttgtctggcaaaagaaaaaaaatagactttttcaactcagctttttgagacctgaaaaaattattatgtaaattttgcaatgttaaagatgcacagaatatgtatgtatagtttttaccacagtggatgtataataccttggcatcttgtgtgatgttttacacacatgagggctggtgttcattaatactgttttctaatttttccatagttaatctataattaattacttcactatacaaacaaattaagatgttcagataattgaataagtacctttgtgtccttgttcatttatatcgctggccagcattataagcaggtgtatacttttagcttgtagttccatgtactgtaaatatttttcacataaagggaacaaatgtctagttttatttgtataggaaatttccctgaccctaaataatacattttgaaatgaaacaagcttacaaagatataatctattttattatggtttcccttgtatctatttgtggtgaatgtgttttttaaatggaactatctccaaatttttctaagactactatgaacagttttcttttaaaattttgagattaagaatgccaggaatattgtcatcctttgagctgctgactgccaataacattcttcgatctctgggatttatgctcatgaactaaatttaagcttaagccataaaatagattagattgttttttaaaaatggatagctcattaagaagtgcagcaggttaagaattttttcctaaagactgtatatttgaggggtttcagaattttgcattgcagtcatagaagagatttatttcctttttagaggggaaatgaggtaaataagtaaaaaagtatgcttgttaattttattcaagaatgccagtagaaaattcataacgtgtatctttaagaaaaatgagcatacatcttaaatcttttcaattaaggtcgacgcggccgcggtcgacgcggccgcgaattc

SEQ ID NO: 6272 - protein, 1132 aa, Homo sapien [sequence omitted]

SEQ ID NO: 6273 - DNA, 604 bp, Homo sapien; identical to SEQ ID NO: 3991

SEQ ID NO: 6274 - protein, 103 aa, Homo sapien [sequence omitted]

SEQ ID NO: 6275 - DNA, 1325 bp, Homo sapien
gaggtattcaagaatgcccagccccctatacgggatgccacagatctgagagaaaacatgcagaatgcggtggtgtcattcaaggagctgtgtggcctctcctctgtggccaatctcatgcagtgcatgttggcggtgtctccccgctttctggggcccgataacacacccctagtggtcctaaatctcagcgagcagtaccccacaatggagctgcagggaattgtgccggaggttctgaagaagatcgtaacaacttatgacatgatgattcagtccctcaaggcgttgattgaaaatgcagatgctgtatatgaaaagatcgtacattgtcagaaggcagccatggaattccatgaacacttgcacagcataggcaccaaggaaggtttgaaggaaagaaaactacaaaaagcagtggagagctttacctggaatattaccatcttaaagggacaagcagatcttttgaaatatgctaagaatgagacattggagaacctgaaacaaatccattttgctgctgtttcatgtggactgaataaaccaggcaccgaaaatgctgatgtccagaagccacgccggagcttggaagtcatacccgaaaaagcaaacgatgaaactggagaatgaggaaacttacaataaaccattatggagtttataactctaggaccaattgtagtcagatgggacatttgctttgcactcactaatgagaataatattcgggattttaaagcacaactggaatagctaattacagtctattaaaactgtgaatgtatgtagcaatcctgcgtgtgaaggcaaataaactctttaacaggcaattatattgctggccaaaatatgctatatttgtatacaaagacattctaactcagttccagtatgaagaaagattattcactctagctccactgagaaacattttcctaagtgaaaacaatttcttaagatggaaatggattggattgtcaaattattatttattggagaaaaaaacctgatctacacatttttacttatatggggttgccagagtctctgggttctagatgattttggtggcatgcttgctgagccataattactaaagagaatgtaagtggacgggttccctgaatccccggggtccttggagagccatcgaggagaatgtgcaattggactgaagctccctggctgaagatacatgccgagtcagcacatgggtagagatgatgtaaaagcagccaatctggaaacaatacattgtaaatagtttttcattgtatgaagtagtgttcacattaaaaagatgttttatgataaaaaaaaaa

SEQ ID NO: 6276 - DNA, 598 bp, Homo sapien
  Unsure 124: Unknown base
cataacacagccagctttttgctagccagaccaaactcaaagagcaatggctgtacttctgaaatagcaacactttgtcctagctgagatttggtaataagattttttttttaagtttttaaangaagctcagtggttgaaagtctgcttaactgaaacagtaacatccatgatgtgtgttttgtgcatgtttgtatttgaaaggccttcatgtttttgtttcttgtttgtttttctctcctaagaccttgtcttttttttgtagcaaaagtttttttttttttttccttttacttctcagttgactgaattctgttttcaccggattttttgactaaaatagctattgcaacagaggctactcttgggttaaggaagaatgtagtttcgttttatgtttaatatcgctcaaagaaaaataaaagcatctccctctaacaccaccagacttttcctctctgtaccttatcatgtaaattttgctatttgattttcacctgggttgtttcctttaatgtgcaaaaatttaaggctatttagctgacaactgcctagggttgtaaaacaggttatcaagaatctgaaagtctaagatagg

SEQ ID NO: 6277 - DNA, 2093 bp, Homo sapien
gccccatgcaagtccaaaacccagcaggcaaatcttagagctccaaaatgacctcctttgactccatgtgtcacatctaggtgatgcaagaagtgggttcccagggtcttgggcagccccgcccctgtggctttgcagggtacggcccccccttctggctgcattgagtgtctgcagcttttccaggcacacagtgcaagctgtcagtggatctaccattctggggtctggaggatggtggcccctttgtgacagctctgcttggcagtaccccagtggggactctgtgtgggggctccaaccccatatttccctttgacactgccctagcagaggttatccatgaggcccccccgctcccgtgcacagcaaacttttgcctggatttccaggcattttcatacatcttctgaaatctaggcggaggttcatgaacgttaattcttcggtgcatctgcaggcttaacaccacctagaacctgaaaggcttggaacttgcaccctctgaagccatggcctgaggtgtaccttggccccttttacctgtggcaggagcagctgggatgcagggcaccaggttcctaggctgcacacagcagggggttccggactcacaagagcatttttccttctaagcctcctggcctgtgatgggagggtctgctgtgagggtctctaacatgccctggagacatttgccccattgtcttggtgattaacatttggctcctcattacttatgcaaatttctacaacccagtctcctgagaaaatagatttttcttttctgttgcatcatcaggctacaaattttctgaacttttatgctctgcttcttctcgaatgctttgctgcttagaaatttcttctgtcagataccttaaatcatctctctcaagttcaaagttccacagatctctagggaactctagaaaaaaattcttattttgactctttcccgcctatcttatgcccgtttctaatacaggtgcacagtgcctgcagtgtctttgcatagtaagagtgactttactccatttcccaacaaattcctcatctccctctgagaccacctccgcctggaccttattgtccatatcactattaacattttggtcaaagccattcaacaagtctctaggaagttccaaactttcccacattttcctatcctcttctgagccttccaaactgttccagcctctccctgttacccatttccaaagttgcttccacattttcgggtatctttacagcagcagcccactctactggtatcaacttattgtattagtctgttctcacactgcaaataaagacatacctgagactgggtaatttataaaggaaagaggttgaattgactcacagttctgcatggctggggaggcctcacaatcatggtggaaggcaaggaggtgcaaaagcatgtctcacatagtggcaaggcaggagagagcatgtgcaggggagctcccatttataaaaccatcagatctcatgagacttagtcactaccacgagaacagtatggggggaaccatccccatgattcagttatctgcacctggccccacccttgacacgtgggaattattccaatgcaaggtgagatttgggtggggacccatccaaactatgtcagtatgttttgacttctggcttgattgctaggttgcatagaggacaaacatggaaattaatgaagtaccttaatatctggcttcagatcttagacaggatcagagggccagctcaaatttgcaaggaggggaggtagatcccaccattttatgggtgaatggcaaaatcaaacagaaattatgtgggatgggagatactgatgcaggcatctttggaaacattctacttagctaattttatgctaggctttaggtcaagaaggagagagagagctgacatgctgtggtacacacttattgtcccagcgacttggaaagctgaggcaggaggattgcttgatcccaggagtttgaggtagtgtgcgatgatcgttcttgtgaatagccactagccactgaactccagcttgggcaacattgagacaccctgtctcttaatttaaaaaaaaa

SEQ ID NO: 6278 - DNA, 1469 bp, Homo sapien; identical to SEQ ID NO: 4871

SEQ ID NO: 6279 - protein, 337 aa, Homo sapien; identical to SEQ ID NO: 4872

SEQ ID NO: 6280 - DNA, 2764 bp, Homo sapien; identical to SEQ ID NO: 3289

SEQ ID NO: 6281 - protein, 374 aa, Homo sapien; identical to SEQ ID NO: 3290

SEQ ID NO: 6282 - DNA, 886 bp, Homo sapien
ggcacgaggccctcgccgcggagccgcgcggagcggagccggcgagctaacccgagccagccggcgggcgtcccggaggcggtggcgcagggaggggcccgacgctcgcacgtggccccggcggccgccatggcggacagcggcaccgcggggggcgcggcgttggcggccccggcccccgggccgggcagtggcggcccaggaccacgcgtctactttcagagcccccccggggccgcaggagagggcccgggcggggcggacgatgagggcccagtgaggcgccaagggaaggtcaccgtcaagtatgaccgcaaggagctacggaagcgcctcaacctagaggagtggatcctggagcagctcacgcgcctctacgactgccaggaagaggagatcccagaactggagattgacgtggatgagctcctggacatggagagtgacgatgcccgggctgccagggtcaaggagctgctggttgactgttacaaacccacagaggccttcatttctggcctgctggacaagatccggggcatgcagaagctgagcacaccccagaagaagtgagggtccccgacccaggagaacggtggctcccacaggacaatcgctgccccccaacctcgtagcaacagcaataccgggggaccctgcggccaggcctggtgccatgagcagggctcctcgtgcccctggcccaggggtctcttcccctgccccctcagttttccacttttggggttttttattgttattaaactgatgggactttttgtgtttttatattgactctgcggcgcgggccctttaataaagctaggatacgcctttggtgcaaaaaaaaaaaaaaaaaaaaaaaaaaaaaaaaaaaaaaaaaaaa

SEQ ID NO: 6283 - protein, 147 aa, Homo sapien
MADSGTAGGAALAAPAPGPGSGGPGPRVYFQSPPGAAGEGPGGADDEGPVRRQGKVTVKYDRKELRKRLNLEEWILEQLTRLYDCQEEEIPELEIDVDELLDMESDDARAARVKELLVDCYKPTEAFISGLLDKIRGMQKLSTPQKK

SEQ ID NO: 6284 - DNA, 1190 bp, Homo sapien
ggcacgaggctgaggtgtatttcgggtcttgctggggctgagagagaccacagccctttggggggtacaaacaagagttcagttgctgtgaattctgccactgtgcccagctctgaagcctcagctcttgccaaacagacccgagacccatgtcagccccactggatgccgccctccacgcccttcaggaggagcaggccagactcaagatgaggctgtgggacctgcagcagctgagaaaggagctcggggactcccccaaagacaaggtcccattttcagtgcccaagatccccctggtattccgaggacacacccagcaggacccggaagtgcctaagtctttagtttccaatttgcggatccactgccctctgcttgcgggctctgctctgatcacctttgatgaccccaaagtggctgagcaggtgctgcaacaaaaggagcacacgatcaacatggaggagtgccggctgcgggtgcaggtccagcccttggagctgcccatggtcaccaccatccaggtgatggtgtccagccagttgagtggccggagggtgttggtcactggatttcctgccagcctcaggctgagtgaggaggagctgctggacaagctagagatcttctttggcaagactaggaacggaggtggcgatgtggacgttcgggagctactgccagggagtgtcatgctggggtttgctagggatggagtggctcagcgtctgtgccaaatcggccagttcacagtgccactgggtgggcagcaagtccctctgagagtctctccgtatgtgaatggggagatccagaaggctgagatcaggtcgcagccagttccccgctcggtactggtgctcaacattcctgatatcttggatggcccggagctgcatgacgtcctggagatccacttccagaagcccacccgcgggggcggggaggtagaggccctgacagtcgtaccccaaggacagcagggcctagcagtcttcacctctgagtcaggctaggggcctccccttctcatcctccccacccccccgccaaggttctcacactggcctgggcttgggtgcccatataggaggtctgtatgttcaccaacagtgcggaggggtcacacattgcaaaacactgcccagaacagtaaaaagagcctgcatgccaaaaaaaaaaaaaaaaaa

SEQ ID NO: 6285 - protein, 288 aa, Homo sapien
MSAPLDAALHALQEEQARLKMRLWDLQQLRKELGDSPKDKVPFSVPKIPLVFRGHTQQDPEVPKSLVSNLRIHCPLLAGSALITFDDPKVAEQVLQQKEHTINMEECRLRVQVQPLELPMVTTIQVMVSSQLSGRRVLVTGFPASLRLSEEELLDKLEIFFGKTRNGGGDVDVRELLPGSVMLGFARDGVAQRLCQIGQFTVPLGGQQVPLRVSPYVNGEIQKAEIRSQPVPRSVLVLNIPDILDGPELHDVLEIHFQKPTRGGGEVEALTVVPQGQQGLAVFTSESG

SEQ ID NO: 6286 - DNA, 978 bp, Homo sapien
  Unsure 3, 20, 26, 40, 82: Unknown base
tanagaactgagggtcagantgaccntgcctcatagtatncgatcagattcagaagatatctgtttatttacgaaggatgancccaattcaactcctgaaaagacagaacagttttatagaaagcttttaaacaagcatggaattaaaaccgtttctcagattatctccctccaaactctaaagaaggaatataaatcctatgaagccaagctccgccttctgagcagttttgatttcttccttactgatgccagaattaggcggctcttaccctcactcattgggagacatttctatcaaagaaagaaagttccagtatctgtaaaccttctgtccaagaatttatcaagagagatcaatgactgtataggtggaacagtcttaaacatttctaaaagtggttcttgcagtgctatacgtattggtcacgttggaatgcaaattgagcacatcattgaaaacattgttgctgtcaccaaaggactttcagaaaaattgccagagaagtgggagagcgtgaaactcctgtttgtgaaaactgagaaatcggctgcacttcccatcttttcctcgtttgtcagcaattgggatgaagccaccaaaagatctttgcttaataagaagaaaaaagaggcaaggagaaaacgaagagaaagaaattttgaaaaacaaaaggagaggaagaagaagaggcagcaggctaggaagactgcatcagttcttagtaaagatgatgtggcacctgaaagtggtgatactacagtgaagaaacctgaatcaaagaaggaacagaccccagagcatgggaagaaaaaacgtggcagaggaaaagcccaagttaaagcaacaaatgaatccgaagacgaaatcccacagctggtaccaataggaaagaagactccagctaatgaaaaagtagagattcaaaaacatgccacaggaaagaagtctccaggcaaagagtcctaatcccagca

SEQ ID NO: 6287 - DNA, 3166 bp, Homo sapien
gcgggaggttcggagcgggagctcgggctcgcggacggtatggaggactacgagcaggagctgtgcggcgtcgaggatgatttccacaaccagttcgcggccgagctggaggtgctggcagagctggaaggggcgtcgactccgtcgccctccggggtccccctgttcaccgcgggccgacccccgcggacgttcgaggaggcccttgccagaggggacgcggcctccagtcccgccccagccgcatctgtgggcagcagccagggcggcgccaggaagaggcaggtggacgccgacctgcagccggccgggtccctgccccacggtaggttggcggcattgccccagggcctccggagtgggcgcgaggctgaggaggcctctggttccctgcatgtgtctcccccagcccccaggatcaaacggcctaggctgcaggtggtcaagaggctgaacttcaggtcggaggagatggaggagccgccccctcccgactcctcgccgacggacatcaccccgccgccgagccctgaggacctcgcagagctttggggccacggagtctcagaagctgctgccgacgtgggtctcacacgggcctcaccagctgcccgcaatcccgtcctgaggcggccccccatcttggaggactacgtccacgtgacatccacggagggcgtccgggcttatctggtgctgcgtgctgaccccatggccccgggggtgcagggctctctcctccacgtcccatggcgaggcggtggccagctggacctgctgggtgtgtccttagcctccctgaagaagcaggtcgacggcgagcggcgggagcggctgcttcaggaggcccagaagctttcagacaccctgcacagtctcaggtcgggggaggaggaggcagcccagcccttgggggcccctgaggaggagccgactgacggtcaagacgcctccagtcactgcctctgggtggatgagtttgcaccccgccactacacggagctgctcagtgatgacttcaccaaccgctgcctgctcaagtggctgaagttgtgggacctggtggtgtttggccacgagaggccttcccggaagcccaggcccagtgttgagccggcccgggtcagcaaggaggccacagccccaggcaagtggaagagccacgaacaggtgctggaggagatgctggaggctgggctggacccgagccagcgaccgaagcagaaggtggcactgctctgtgggcccccggggctggggaagaccaccctggcacacgtgattgcgcgtcacgcggggtactctgtggtggagatgaacgccagtgacgaccgtagcccggaggtcttccgcacacgcatcgaggcggccacccagatggagtcggtgctgggtgctggcgggaagcccaactgcctggtcatcgatgagatcgacggggcccccgtggccgccatcaacgtcctcctgagcatcctgaaccgcaaggggccacaggaggtggggccacagggcccggctgtgccttcgggaggcggccgacggcgccgggcagagggggggctcctcatgaggcccattatctgcatttgcaatgaccagttcgcaccgtccctgcggcagctgaagcagcaggccttcctgctccacttcccgccgactctgccctcgaggctggtgcagcggctccaggaggtctccctgcggcagggcatgagggccgacccaggggtgctggccgccctctgtgagaaaactgacaatgacatccgggcctgcatcaacaccctgcagttcctgtacagccggggccagcgggagctgagcgtgcgggacgtgcaggccacacgcgtgggcctcaaggaccagcgcagagggctcttctcggtgtggcaggaggtcttccagctgcctcgagcccagaggcgccgtgtgggccaggaccccgccctgcctgctgacacactcctgctgggtgacggggacgcgggctccctcacctccgcctcacagcgattctaccgtgtcctgcatgccgctgcctctgcgggcgagcacgagaaggtggtccagggcttgtttgacaacttcctgcgtctgcggctgcgagactccagcctgggtgctgtgtgtgtggccctcgactggctggccttcgatgacctgctggcgggggctgctcatcacagccagagcttccagctgctgcgctacccacccttcctgcccgtggccttccatgtgctgtttgcttccagccacacacccaggatcaccttccccagcagccagcaggaggcccagaaccggatgagccagatgaggaacctgatccagacgctggtgtccggcatcgcgccagccacgcgcagccgggccacgccccaggccctgctcctcgatgccctctgcctgctcctggacattcttgcacccaagctccgccccgtgagcacacagctgtacagcacccgtgaaaagcaacagctggccagcctggtgggcacgatgctcgcttacagcctgacctaccgccaggagcgcacgcccgatggccagtacatctacaggctggagccgaacgtggaggaactctgccgcttccctgagctgcctgcccgcaagcccctcacctaccagacgaagcagctcatcgcccgcgagatcgaggtggagaagatgcggcgggcggaggcttctgcccgggtagagaacagcccccaggtggatgggagccccccagggctcgagggtctgctggggggcattggggagaaaggggtgcaccgacctgccccacgcaaccatgagcagcggctggagcacatcatgaggcgagcggcccgggaggaacagcctgagaaggacttctttggacgtgtggtcgtcaggagcacagcagtcccgagtgcaggggacacggccccggagcaggactcagtggagcggcgcatgggcacagcggtgggcaggagcgaggtctggttccgcttcaacgagggtgtctccaacgccgtgcggcgcagcctgtacatcagggacttgctctagttctctgagccgcggacatgccctcgcattgcttcccgcagagtgcagagacaggaagctggagatgtctttataaagtcacacctttacagactgtaaaaaaaaaaaaaaaaaa

SEQ ID NO: 6288 - protein, 1016 aa, Homo sapien
AGGSERELGLADGMEDYEQELCGVEDDFHNQFAAELEVLAELEGASTPSPSGVPLFTAGRPPRTFEEALARGDAASSPAPAASVGSSQGGARKRQVDADLQPAGSLPHGRLAALPQGLRSGREAEEASGSLHVSPPAPRIKRPRLQVVKRLNFRSEEMEEPPPPDSSPTDITPPPSPEDLAELWGHGVSEAAADVGLTRASPAARNPVLRRPPILEDYVHVTSTEGVRAYLVLRADPMAPGVQGSLLHVPWRGGGQLDLLGVSLASLKKQVDGERRERLLQEAQKLSDTLHSLRSGEEEAAQPLGAPEEEPTDGQDASSHCLWVDEFAPRHYTELLSDDFTNRCLLKWLKLWDLVVFGHERPSRKPRPSVEPARVSKEATAPGKWKSHEQVLEEMLEAGLDPSQRPKQKVALLCGPPGLGKTTLAHVIARHAGYSVVEMNASDDRSPEVFRTRIEAATQMESVLGAGGKPNCLVIDEIDGAPVAAINVLLSILNRKGPQEVGPQGPAVPSGGGRRRRAEGGLLMRPIICICNDQFAPSLRQLKQQAFLLHFPPTLPSRLVQRLQEVSLRQGMRADPGVLAALCEKTDNDIRACINTLQFLYSRGQRELSVRDVQATRVGLKDQRRGLFSVWQEVFQLPRAQRRRVGQDPALPADTLLLGDGDAGSLTSASQRFYRVLHAAASAGEHEKVVQGLFDNFLRLRLRDSSLGAVCVALDWLAFDDLLAGAAHHSQSFQLLRYPPFLPVAFHVLFASSHTPRITFPSSQQEAQNRMSQMRNLIQTLVSGIAPATRSRATPQALLLDALCLLLDILAPKLRPVSTQLYSTREKQQLASLVGTMLAYSLTYRQERTPDGQYIYRLEPNVEELCRFPELPARKPLTYQTKQLIAREIEVEKMRRAEASARVENSPQVDGSPPGLEGLLGGIGEKGVHRPAPRNHEQRLEHIMRRAAREEQPEKDFFGRVVVRSTAVPSAGDTAPEQDSVERRMGTAVGRSEVWFRFNEGVSNAVRRSLYIRDLL

SEQ ID NO: 6289 - DNA, 4380 bp, Homo sapien
gcatatcttgagtagaacttaacatatcttgaatgggatatttttttcttttattcttatgagtggtctcacacaggaccaaacagcaggccagcatagcaccacgtgatctgagcttgtttttactctctcctttttcataaacagagtcccagattaatgccagtagttgattttgggtctttggggtagtgaagcttgtggatttgacttctctgattccttttgctgaccttgagtggattgtatctttcactgttaattataataatttaaaaattgagttctacttactggacatgaatctctgcacttgaaagttaacatattaaaagcatattttttttcttccttggttttcttgttcatgtggataacccagagaatgcctgaatctaaggtgccatcctctgagaatcatcgcccagaaatgtgctctagctgcaatgttcctcttcccattggagatagcagctccttctctgggagttgttccagcagtccagaaaggatagtttctcaaacttcctctgttgagaacccattggagaaccagaaaaatgatcaaaataattcagatactaagatctctgagacagagacccttaaatcatcacagaattttcagactctgccttcatctccacttctggtcccccaagaatctttggcctcttctgaggtcaaagagaatttacgtatagattcttcttcagcttcacagcatggacgggatgccatcctctatctccagacacaagtagctgaaatgtcccgagtgatacgtgatctgcagtccaggagctgttttagatttcatcattctaggccaagtgagaactcctcagttccttgggacatctccacctctaaagaggaaaatttatccacagttgaagaagaaactgattacaaatcaccatcagctgatgacaaagggcagccatctgaccccagccaatctagtttcacaggtcttttgaagagaatggaacaaagaggtgttataaaaagggtgacattacaatctgaagcggagtcatgtgaagggaaacctgattgtgtgacttctaaaaaacgtttggttcctccattgcatcctcttctgagaattgccaccactgaggtttttaaagaccctgctgattgccatccttcttccttcatgggacacagggtatatcctgtggccaaggacacctctcctttccaaccaaacccaccagctgaaggccccattgtagaagcattagaacacagcaaaagaggaaacacaacatcccctctagattctacctcaaaagaaatggaggtcatgggttgtaggttttaccacgctgcctccattgcagcccgagctgctagctacatggcctatatgactcaatatcagcgtaaactctgggaagacatggaagatctggttcatgacccagaatttgatcgtggaaaagcaagatgcataatatctgatggtatggatgcaggcctttggcaactttgtactactagggacataatggactctgtagtcagagttatggccatggccatagactatagacggcaggcctggcttcgacttacatctctcactaagaaaacccaggagaagatctcccacttgccctttgatggtacttccctttttggacaagatgtgaaagctgttgttgcagaagacaacaatataaaagaaaatgactataaagatcacaaatactataatcagcatcgatacttttatagtcatgatcagaaagcacattatcacaatagaggatactccaaaggggattggtacaaacctcgaaaccacccctatagatatagaaagaagggagactctccagaacgccatgggtacaagaattaataacctgtttaatgttcagcagagtagtcattcaagatcctaactattttacttgttcctccttgtacaaataggatctacaggtaggagatcatctcaaaaactggatgcatgtctggaatgatcacagctgacatttgaattctagacttttgaaatgaagtatataataaagaaactcatgacttggccaagtgagcagtggagactttcttgaaagggttggacaaatgtttatcctttatttctggtccaaaaataagtgtggaggaggaccactcaggaatctgaatcctcttgtgattaaagaaaaatataaagatgtgttcctcaggaaaatcttatttgtaaactgaggactagcagattttgaatctagaaataatactagatgtctgtttactaagaccagaggtaaatccttaacttttaggttatcagtgcttccttgttcaggcttcagtttgacagatcttcacaaaatgacacatctgttaaaatgtctttatgtcaagatggtcaactcaccaagagtccgtactactatcaagctctgtgagacttcagaatcagccatgaagctttgtgtcaactggaattcaaatcaaattttgccaaatccagtttgcttccccttggaatggctagatgtcgcaggtctattatggacaccaactggaaaaagacttctacctgtaacatctctgtagaaattgcacagtaactatcttcatcaagactttgatggccaccataccatcactactcataaagctacatgtgagagaattgtttgttgttatcaatcctaatagtctttgacctatcaagctctcgtatcaagctgtaagactgagtcatggtagtctctcactgtaagctgggcctttcaccaagatggccttcttaaacaacctaccttctaaacatttaattcttttgagcttgatagtgcatcacactctaaatacaaaaaagatacgcacatcagtgccctggaaataaaggatgttacacgatccaggcatgcaaatctgaactcctaagaccaagaattccaaacatgcctgacaatcttgtccccttattgtaataaagagggataccatcagtctagattttattgagaatccttaagatttaaagcatagctgtggatgtggtgaagagaacaagccacacagctctgtttctggatatctaagtgatgatatccattaatgatttgaaaggctgaaatcaagatttaagtgatacgctcttggttaattggttacttaatttagtcagattcttagtgtaagagacagcttatctttttgctcccaattggtcccattaatagtttttcaccatactggaactggcagcagatacctcaattatatgtcccacagtatcttctctttagactcaaggtagtggatgtatggtatatcagcccttagatccatgtcttcacagcatgacatcaggaatggagaatatgtcaaatttgaggggtctgaatacatcacctagtattatttgcttggcagccaaaaacagttgtttttattgacagacttaattctgtaacttctgcgttttttcatctgcttgatcaaggcattttggatgtactgctaatggaatatggcactgttttacggtttatgtggcttctgttcttgccacagttgttgcacagtggtaattgatgttttctctggtgccacactttttaataatctattggaagctcattcctcctcccccatcataaccatattcagcacccatttttaaatctacttttcttccttatttgtgctacagaggttgatggcgtaaattttcctacttggaagaaattactttatcagttaatttcagggtactgtattgatcttgtttgtcctatttgtagattaaacttgaactagtcttaataaaggggatattgttttgcaaatttagcccagtcatatcaagagttaatatttatcttatttttctgtattttactcaaaattttatttccacttctgtagaaataggtccatgccagtgttctctacaaagtgtctttcaaactaaactctagaagaatatcgattacctgaacagaaacaaaggcctaagaaatcatacatttttgtagcttatgtgtattgcaccaatcaagcaatcccatgtgctcttgatattggcactgtagttttatcttagaggacttgccactggagaactcagtggtgagagaccttggaaatgttttatgtggctgcacataagtgtttctgactagctaaggctacttcagacttttcactttccatttgtccccttttccttccctgaattagatgctatgtcataaacttggtggtttttgaaatactcttatttcaaaccttaaactaaaccgaaataagttatgcctgagaatgcgtttgtctgaaacgattttggcacttccctttaatatgcttccccttccctttgccttttaaattgtggtt

SEQ ID NO: 6290 - protein, 530 aa, Homo sapien
VLLTGHESLHLKVNILKAYFFSSLVFLFMWITQRMPESKVPSSENHRPEMCSSCNVPLPIGDSSSFSGSCSSSPERIVSQTSSVENPLENQKNDQNNSDTKISETETLKSSQNFQTLPSSPLLVPQESLASSEVKENLRIDSSSASQHGRDAILYLQTQVAEMSRVIRDLQSRSCFRFHHSRPSENSSVPWDISTSKEENLSTVEEETDYKSPSADDKGQPSDPSQSSFTGLLKRMEQRGVIKRVTLQSEAESCEGKPDCVTSKKRLVPPLHPLLRIATTEVFKDPADCHPSSFMGHRVYPVAKDTSPFQPNPPAEGPIVEALEHSKRGNTTSPLDSTSKEMEVMGCRFYHAASIAARAASYMAYMTQYQRKLWEDMEDLVHDPEFDRGKARCIISDGMDAGLWQLCTTRDIMDSVVRVMAMAIDYRRQAWLRLTSLTKKTQEKISHLPFDGTSLFGQDVKAVVAEDNNIKENDYKDHKYYNQHRYFYSHDQKAHYHNRGYSKGDWYKPRNHPYRYRKKGDSPERHGYKN

SEQ ID NO: 6291 - DNA, 3479 bp, Homo sapien
tgaaagagggaatcgtgtcttactcatctttgtatccccagtgtctagcagttcctgatacatagttttagctgaattttgggacatggccactgcttcaccaaggtctgatactagtaataaccacagtggaaggttgcagttacaggtaactgtttctagtgccaaacttaaaagaaaaaagaactggttcggaacagcaatatatacagaagtagttgtagatggagaaattacgaaaacagcaaaatccagtagttcttctaatccaaaatgggatgaacagctaactgtaaatgttacgccacagactacattggaatttcaagtttggagccatcgcactttaaaagcagatgctttattaggaaaagcaacgatagatttgaaacaagctctgttgatacacaatagaaaattggaaagagtgaaagaacaattaaaactttccttggaaaacaagaatggcatagcacaaactggtgaattgacagttgtgcttgatggattggtgattgagcaagaaaatataacaaactgcagctcatctccaaccatagaaatacaggaaaatggtgatgccttacatgaaaatggagagccttcagcaaggacaactgccaggttggctgttgaaggcacgaatggaatagataatcatgtacctacaagcactctagtccaaaactcatgctgctcgtatgtagttaatggagacaacacaccttcatctccgtctcaggttgctgccagacccaaaaatacaccagctccaaaaccactcgcatctgagcctgccgatgacactgttaatggagaatcatcctcatttgcaccaactgataatgcgtctgtcacgggtactccagtagtgtctgaagaaaatgccttgtctccaaattgcactagtactactgttgaagatcctccagttcaagaaatactgacttcctcagaaaacaatgaatgtattccttctaccagtgcagaattggaatctgaagctagaagtatattagagcctgacacctctaattctagaagtagttctgcttttgaagcagccaaatcaagacagccagatgggtgtatggatcctgtacggcagcagtctgggaatgccaacacagaaaccttgccatcagggtgggaacaaagaaaagatcctcatggtagaacctattatgtggatcataatactcgaactaccacatgggagagaccacaacctttacctccaggttgggaaagaagagttgatgatcgtagaagagtttattatgtggatcataacaccagaacaacaacgtggcagcggcctaccatggaatctgtccgaaattttgaacagtggcaatctcagcggaaccaattgcagggagctatgcaacagtttaaccaacgatacctctattcggcttcaatgttagctgcagaaaatgacccttatggacctttgccaccaggctgggaaaaaagagtggattcaacagacagggtttactttgtgaatcataacacaaaaacaacccagtgggaagatccaagaactcaaggcttacagaatgaagaacccctgccagaaggctgggaaattagatatactcgtgaaggtgtaaggtactttgttgatcataacacaagaacaacaacattcaaagatcctcgcaatgggaagtcatctgtaactaaaggtggtccacaaattgcttatgaacgcggctttaggtggaagcttgctcacttccgttatttgtgccagtctaatgcactacctagtcatgtaaagatcaatgtgtcccggcagacattgtttgaagattccttccaacagattatggcattaaaaccctatgacttgaggaggcgcttatatgtaatatttagaggagaagaaggacttgattatggtggcctagcgagagaatggtttttcttgctttcacatgaagttttgaacccaatgtattgcttatttgagtatgcgggcaagaacaactattgtctgcagataaatccagcatcaaccattaatccagaccatctttcatacttctgtttcattggtcgttttattgccatggcactatttcatggaaagtttatcgatactggtttctctttaccattctacaagcgtatgttaagtaaaaaacttactattaaggatttggaatctattgatactgaattttataactcccttatctggataagagataacaacattgaagaatgtggcttagaaatgtacttttctgttgacatggagattttgggaaaagttacttcacatgacctgaagttgggaggttccaatattctggtgactgaggagaacaaagatgaatatattggtttaatgacagaatggcgtttttctcgaggagtacaagaacagaccaaagctttccttgatggttttaatgaagttgttcctcttcagtggctacagtacttcgatgaaaaagaattagaggttatgttgtgtggcatgcaggaggttgacttggcagattggcagagaaatactgtttatcgacattatacaagaaacagcaagcaaatcatttggttttggcagtttgtgaaagagacagacaatgaagtaagaatgcgactattgcagttcgtcactggaacctgccgtttacctctaggaggatttgctgagctcatgggaagtaatgggcctcaaaagttttgcattgaaaaagttggcaaagacacttggttaccaagaagccatacatgttttaatcgcttggatctaccaccatataagagttatgaacaactaaaggaaaaacttctttttgcaatagaagagacagagggatttggacaagaatgaatgtggcttcttattttggaggagctcttgcatttaaataccccagccaagaaaaattgcacagatagtgtatataagctgttcattctgtacagtgaattttccgaacctctcaaagtatgttttccgttcttccacagaaatatgcaaaacagttcatccttttctactttatttattgttcccttgaaatgactgaccaggaaaaagatcatccttaaattttgaagcaagtgagagactttattaaaaatacatatatatctatataaacatatatgatagtggctctagttttatagagctccaagtgtattaaacatgacagccattcattcataaagatctggatttgctttaccttgttaatattatctaggggaaaaagtgcaaattgctccatgttcttctctcccttatgtaacatctcctgagggtgtttagttgcatggctgttcagaaaggtattaagggcttaggccaaatcttactttgagtatgttaaaaaaaaaaaaatgctgctggcttttctgaagacaggtgcttgaacttgtcagtttgttttaaataaatacaatagttgaaaatttaaaaaaaaaaaaaaaaaaaaaaaaaaaaaaaaaaa

SEQ ID NO: 6292 - protein, 922 aa, Homo sapien
MATASPRSDTSNNHSGRLQLQVTVSSAKLKRKKNWFGTAIYTEVVVDGEITKTAKSSSSSNPKWDEQLTVNVTPQTTLEFQVWSHRTLKADALLGKATIDLKQALLIHNRKLERVKEQLKLSLENKNGIAQTGELTVVLDGLVIEQENITNCSSSPTIEIQENGDALHENGEPSARTTARLAVEGTNGIDNHVPTSTLVQNSCCSYVVNGDNTPSSPSQVAARPKNTPAPKPLASEPADDTVNGESSSFAPTDNASVTGTPVVSEENALSPNCTSTTVEDPPVQEILTSSENNECIPSTSAELESEARSILEPDTSNSRSSSAFEAAKSRQPDGCMDPVRQQSGNANTETLPSGWEQRKDPHGRTYYVDHNTRTTTWERPQPLPPGWERRVDDRRRVYYVDHNTRTTTWQRPTMESVRNFEQWQSQRNQLQGAMQQFNQRYLYSASMLAAENDPYGPLPPGWEKRVDSTDRVYFVNHNTKTTQWEDPRTQGLQNEEPLPEGWEIRYTREGVRYFVDHNTRTTTFKDPRNGKSSVTKGGPQIAYERGFRWKLAHFRYLCQSNALPSHVKINVSRQTLFEDSFQQIMALKPYDLRRRLYVIFRGEEGLDYGGLAREWFFLLSHEVLNPMYCLFEYAGKNNYCLQINPASTINPDHLSYFCFIGRFIAMALFHGKFIDTGFSLPFYKRMLSKKLTIKDLESIDTEFYNSLIWIRDNNIEECGLEMYFSVDMEILGKVTSHDLKLGGSNILVTEENKDEYIGLMTEWRFSRGVQEQTKAFLDGFNEVVPLQWLQYFDEKELEVMLCGMQEVDLADWQRNTVYRHYTRNSKQIIWFWQFVKETDNEVRMRLLQFVTGTCRLPLGGFAELMGSNGPQKFCIEKVGKDTWLPRSHTCFNRLDLPPYKSYEQLKEKLLFAIEETEGFGQE

SEQ ID NO: 6293 - DNA, 2375 bp, Homo sapien; identical to SEQ ID NO: 3956

SEQ ID NO: 6294 - protein, 490 aa, Homo sapien; identical to SEQ ID NO: 3957

SEQ ID NO: 6295 - DNA, 2071 bp, Homo sapien; identical to SEQ ID NO: 3527

SEQ ID NO: 6296 - protein, 195 aa, Homo sapien; identical to SEQ ID NO: 3528

SEQ ID NO: 6297 - DNA, 1632 bp, Homo sapien; identical to SEQ ID NO: 3601

SEQ ID NO: 6298 - protein, 102 aa, Homo sapien; identical to SEQ ID NO: 3602

SEQ ID NO: 6299 - DNA, 2530 bp, Homo sapien
ctaaagtggagcccagcggcgggtgtgagagtccgtaaggagcagcttccaggatcctgagatccggagcagccggggtcggagcggctcctcaagagttactgatctatgaaatggcagagaatggaaaaaattgtgaccagagacgtgtagcaatgaacaaggaacatcataatggaaatttcacagacccctcttcagtgaatgaaaagaagaggagggagcgggaagaaaggcagaatattgtcctgtggagacagccgctcattaccttgcagtatttttctctggaaatccttgtaatcttgaaggaatggacctcaaaattatggcatcgtcaaagcattgtggtgtcttttttactgctgcttgctgtgcttatagctacgtattatgttgaaggagtgcatcaacagtatgtgcaacgtatagagaaacagtttcttttgtatgcctactggataggcttaggaattttgtcttctgttgggcttggaacagggctgcacacctttctgctttatctgggtccacatatagcctcagttacattagctgcttatgaatgcaattcagttaattttcccgaaccaccctatcctgatcagattatttgtccagatgaagagggcactgaaggaaccatttctttgtggagtatcatctcaaaagttaggattgaagcctgcatgtggggtatcggtacagcaatcggagagctgcctccatatttcatggccagagcagctcgcctctcaggtgctgaaccagatgatgaagagtatcaggaatttgaagagatgctggaacatgcagagtctgcacaagactttgcctcccgggccaaactggcagttcaaaaactagtacagaaagttggattttttggaattttggcctgtgcttcaattccaaatcctttatttgatctggctggaataacgtgtggacactttctggtacctttttggaccttctttggtgcaaccctaattggaaaagcaataataaaaatgcatatccagaaaatttttgttataataacattcagcaagcacatagtggagcaaatggtggctttcattggtgctgtccccggcataggtccatctctgcagaagccatttcaggagtacctggaggctcaacggcagaagcttcaccacaaaagcgaaatgggcacaccacagggagaaaactggttgtcctggatgtttgaaaagttggtcgttgtcatggtgtgttacttcatcctatctatcattaactccatggcacaaagttatgccaaacgaatccagcagcggttgaactcagaggagaaaactaaataagtagagaaagttttaaactgcagaaattggagtggatgggttctgccttaaattgggaggactccaagccgggaaggaaaattcccttttccaacctgtatcaatttttacaacttttttcctgaaagcagtttagtccatactttgcactgacatactttttccttctgtgctaaggtaaggtatccaccctcgatgcaatccaccttgtgttttcttagggtggaatgtgatgttcagcagcaaacttgcaacagactggccttctgtttgttactttcaaaaggcccacatgatacaattagagaattcccaccgcacaaaaaaagttcctaagtatgttaaatatgtcaagctttttaggcttgtcacaaatgattgctttgttttcctaagtcatcaaaatgtatataaattatctagattggataacagtcttgcatgtttatcatgttacaatttaatattccatcctgcccaacccttcctctcccatcctcaaaaaagggccattttatgatgcattgcacaccctctggggaaattgatctttaaattttgagacagtataaggaaaatctggttggtgtcttacaagtgagctgacaccattttttattctgtgtatttagaatgaagtcttgaaaaaaactttataaagacatctttaatcattccaaaattgtgtccgttttcttgagcgttttgattttttacttttagcttataccagctgaatggcagccttgcctaatccacctacaacaagaatttcttaagctttcttttatttgcatgagagagccactaccaaggcatgttttgttatgctgaaactgggctgctgcatactgctaaatggcacctctgggattggcctacctggggatttcttggtttgtgaaaacaggagaggagaaatatctcatacaagtgaaaggatactggagagagaaattacccatttctaaaaaaaaaccacactctgtcgtatctgtgttaatgttttctagcatgtactctggtttcaacagacacaaatttatatgttaacccagttttcttgccgttctgtaagtgttttattcttagtgtgatttttttccattgggatgtttttgattgaacttgttcattttgttttgcttgggaggaaaataaacaattttacttttttccttaaaaaaaaaaaaaaa

SEQ ID NO: 6300 - protein, 406 aa, Homo sapien
MAENGKNCDQRRVAMNKEHHNGNFTDPSSVNEKKRREREERQNIVLWRQPLITLQYFSLEILVILKEWTSKLWHRQSIVVSFLLLLAVLIATYYVEGVHQQYVQRIEKQFLLYAYWIGLGILSSVGLGTGLHTFLLYLGPHIASVTLAAYECNSVNFPEPPYPDQIICPDEEGTEGTISLWSIISKVRIEACMWGIGTAIGELPPYFMARAARLSGAEPDDEEYQEFEEMLEHAESAQDFASRAKLAVQKLVQKVGFFGILACASIPNPLFDLAGITCGHFLVPFWTFFGATLIGKAIIKMHIQKIFVIITFSKHIVEQMVAFIGAVPGIGPSLQKPFQEYLEAQRQKLHHKSEMGTPQGENWLSWMFEKLVVVMVCYFILSIINSMAQSYAKRIQQRLNSEEKTK

SEQ ID NO: 6301 - DNA, 1271 bp, Mus musculus
gatcgcaggcgagattacgaggcgaggctcgcgcgcccgcccccgccctggcccccagtgcccacccggtccgcccggcacagccatgatcaaggcgatcctaatcttcaacaaccacgggaagccgcggctctccaagttctaccagccctacagtgaagatacacaacagcaaatcatcagggagactttccatttggtatctaagagagatgaaaatgtttgtaatttcctagaaggaggattattaattggaggatctgacaacaaactgatttatagacattatgcaacgttatattttgtcttctgtgtggattcttcagaaagtgaacttggcattttagatctaattcaagtatttgtggaaacattagacaaatgttttgaaaatgtctgtgagctggatttgattttccatgtagacaaggttcacaatattcttgcagaaatggtgatggggggaatggtattggagacaaatatgaatgagattgttacacaaattgatgcacaaaataagctggaaaaatctgaggctggcttagcaggagctccagcccgtgctgtatcagctgtaaagaatatgaatcttcctgagatcccaagaaatattaacattggtgacatcagtataaaagtgccaaacctgccctcttttaaataaaaatgtaaaaaggccactcccaggtaaaatccagggggaagagtcatctaagtttaccatgcagttgtttaccaaaaatagaggaggagagtcttaacttttgctcttggatttaagtcaaggtactgtatagaagttgtgtaaaatcagtatgaaagttcaatgttgctgttcttgctcagtgattttaaagaaattgagtagttcctatgtgatttttttttttcttttctaaactgcattcctgtgcccacctacggcatgcctctatgtattggctactacagtgttttaaaaagtgtttcagatatttctctaattatgtacaacctaaaatgttggtgttttgtatggatcacaagtgcagcattccttaattccttctgctatatgtcacacagttgttatttggagaaccaagtatgtattgcatgaaaacattatgacttttttctcttagtttaaataaactccaaggtaactggacttctaaagcacctttctgtttgcctgatatctactttagcaataattttttttacaaccctctgactcaacaaagtaaataaaagtatattttatcactaaaaaaaaaaaaaaaaaa

SEQ ID NO: 6302 - protein, 193 aa, Mus musculus
MIKAILIFNNHGKPRLSKFYQPYSEDTQQQIIRETFHLVSKRDENVCNFLEGGLLIGGSDNKLIYRHYATLYFVFCVDSSESELGILDLIQVFVETLDKCFENVCELDLIFHVDKVHNILAEMVMGGMVLETNMNEIVTQIDAQNKLEKSEAGLAGAPARAVSAVKNMNLPEIPRNINIGDISIKVPNLPSFK

SEQ ID NO: 6303 - DNA, 865 bp, Homo sapien; identical to SEQ ID NO: 459

SEQ ID NO: 6304 - protein, 205 aa, Homo sapien; identical to SEQ ID NO: 460

SEQ ID NO: 6305 - DNA, 1355 bp, Homo sapien; identical to SEQ ID NO: 968

SEQ ID NO: 6306 - protein, 165 aa, Homo sapien; identical to SEQ ID NO: 969

SEQ ID NO: 6307 - DNA, 2587 bp, Homo sapien; identical to SEQ ID NO: 486

SEQ ID NO: 6308 - protein, 499 aa, Homo sapien; identical to SEQ ID NO: 487

SEQ ID NO: 6309 - DNA, 1746 bp, Homo sapien; identical to SEQ ID NO: 365

SEQ ID NO: 6310 - protein, 326 aa, Homo sapien; identical to SEQ ID NO: 366

SEQ ID NO: 6311 - DNA, 1408 bp, Homo sapien; identical to SEQ ID NO: 2056

SEQ ID NO: 6312 - protein, 249 aa, Homo sapien; identical to SEQ ID NO: 2057

SEQ ID NO: 6313 - DNA, 1559 bp, Homo sapien
gtttgagcagcattgttagagcctgtggaaaacactttacaactgtgtaactgtcttcatctttacagaggaatagtctacaaggaagacttgtaacctggagaagagacctgtcatttactacatcctttatagtgatgctacaggacgaagaggaatggataaaaacattggcgagcaactcaataaagcgtatgaagccttccggcaggcatgcatggatagagattctgcagtaaaagaattacagcaaaagactgagaactatgagcagagaatacgtgaacaacaggaacagctgtcacttcaacagactattattgacaagctaaaatctcagttacttcttgtgaattccactcaagataacaattatggctgtgttcctctgcttgaagacagtgaaacaagaaagaataatttgactcttgatcagccacaagataaagtgatttcaggaatagcaagagaaaaactaccaaaggtaagaagacaagaggtttcttctcctagaaaagaaacttcagcaaggagtcttggcagtcctttgctccatgaaaggggtaatatagagaagactttctgggatctgaaagaagaatttcataaaatatgcatgctagcaaaagcacagaaagaccacttaagcaaacttaatataccagacactgcaactgaaacacagtgctctgtgcctatacagtgtacggataaaacagataaacaagaagcgctgtttaagcctcaggctaaagatgatataaatagaggtgcaccatccatcacatctgtcacaccaagaggactgtgcagagatgaggaagacacctcttttgaatcactttctaaattcaatgtcaagtttccacctatggacaatgactcaactttcttacatagcactccagagagacccggcatccttagtcctgccacgtctgaggcagtgtgccaagagaaatttaatatggagttcagagacaacccagggaactttgttaaaacagaagaaactttatttgaaattcagggaattgaccccatagcttcagctatacaaaaccctaaaacaactgacaaaacaaagccctcaaatctcgtaaacacttgtatcaggacaactctggatagagctgcgtgtttgccacctggagaccataatgcattatatgtaaatagcttcccacttctggacccatctgatgcaccttttccctcactcgattccccgggaaaagcaatccgaggaccacagcagcccatttggaagccctttcctaatcaagacagtgactcggtggtactaagtggcacagactcagaactgcatatacctcgagtatgtgaattctgtcaagcagttttcccaccatccattacatccaggggggatttccttcggcatcttaattcacacttcaatggagagacttaagacacatttgaaaacagacatatcaagttctatgtgatgattttgggtttttaatactataaatacttgattgtaaactaaattcaagatcatttattggaaaatctagtttcacagctatttg

SEQ ID NO: 6314 - protein, 425 aa, Homo sapien
MDKNIGEQLNKAYEAFRQACMDRDSAVKELQQKTENYEQRIREQQEQLSLQQTIIDKLKSQLLLVNSTQDNNYGCVPLLEDSETRKNNLTLDQPQDKVISGIAREKLPKVRRQEVSSPRKETSARSLGSPLLHERGNIEKTFWDLKEEFHKICMLAKAQKDHLSKLNIPDTATETQCSVPIQCTDKTDKQEALFKPQAKDDINRGAPSITSVTPRGLCRDEEDTSFESLSKFNVKFPPMDNDSTFLHSTPERPGILSPATSEAVCQEKFNMEFRDNPGNFVKTEETLFEIQGIDPIASAIQNPKTTDKTKPSNLVNTCIRTTLDRAACLPPGDHNALYVNSFPLLDPSDAPFPSLDSPGKAIRGPQQPIWKPFPNQDSDSVVLSGTDSELHIPRVCEFCQAVFPPSITSRGDFLRHLNSHFNGET

SEQ ID NO: 6315 - DNA, 1697 bp, Homo sapien
ggatcgaggggactctgaccacagcctgtggctgggaagggagacagaggcggcggcggctcaggggaaacgaggctgcagtggtggtagtaggaagatgtcgggcgaggacgagcaacaggagcaaactatcgctgaggacctggtcgtgaccaagtataagatggggggcgacatcgccaacagggtacttcggtccttggtggaagcatctagctcaggtgtgtcggtactcagcctgtgtgagaaaggtgatgccatgattatggaagaaacagggaaaatcttcaagaaagaaaaggaaatgaagaaaggtattgcttttcccaccagcatttcggtaaataactgtgtatgtcacttctcccctttgaagagcgaccaggattatattctcaaggaaggtgacttggtaaaaattgaccttggggtccatgtggatggcttcatcgctaatgtagctcacacttttgtggttgatgtagctcaggggacccaagtaacagggaggaaagcagatgttattaaggcagctcacctttgtgctgaagctgccctacgcctggtcaaacctggaaatcagaacacacaagtgacagaagcctggaacaaagttgcccactcatttaactgcacgccaatagaaggtatgctgtcacaccagttgaagcagcatgtcatcgatggagaaaaaaccattatccagaatcccacagaccagcagaagaaggaccatgaaaaagctgaatttgaggtacatgaagtatatgctgtggatgttctcgtcagctcaggagagggcaaggccaaggatgcaggacagagaaccactatttacaaacgagacccctctaaacagtatggactgaaaatgaaaacttcacgtgccttcttcagtgaggtggaaaggcgttttgatgccatgccgtttactttaagagcatttgaagatgagaagaaggctcggatgggtgtggtggagtgcgccaaacatgaactgctgcaaccatttaatgttctctatgagaaggagggtgaatttgttgcccagtttaaatttacagttctgctcatgcccaatggccccatgcggataaccagtggtcccttcgagcctgacctctacaagtctgagatggaggtccaggatgcagagctaaaggccctcctccagagttctgcaagtcgaaaaacccagaaaaagaaaaaaaagaaggcctccaagactgcagagaatcccaccagtggggaaacattagaagaaaatgaagctggggactgaggtgcgtcccatctccccagcttgctgctcctgcctcatccccttcccaccaaaccccagactctgtgaagtgcagttcttctccacctaggaccgccagcagagcggggggatctccctgcccccaccccagttccccaacccactcccttccaacaacaaccagctccaactgactctggtcttgggaggtgaggcttcccaaccacggaagactactttaaacgaaaaaaagaaattgaataataaaatcaggagtcaaaattcatcgtcttcaaggcccctctttctagccttttctactactctctgcttggtcaaggtttgtgccccactacagaacagggctaaattagccaccaccactgaaaactcagccgaatttttttataccactctgacgtcagcatttttt

SEQ ID NO: 6316 - protein, 394 aa, Homo sapien
MSGEDEQQEQTIAEDLVVTKYKMGGDIANRVLRSLVEASSSGVSVLSLCEKGDAMIMEETGKIFKKEKEMKKGIAFPTSISVNNCVCHFSPLKSDQDYILKEGDLVKIDLGVHVDGFIANVAHTFVVDVAQGTQVTGRKADVIKAAHLCAEAALRLVKPGNQNTQVTEAWNKVAHSFNCTPIEGMLSHQLKQHVIDGEKTIIQNPTDQQKKDHEKAEFEVHEVYAVDVLVSSGEGKAKDAGQRTTIYKRDPSKQYGLKMKTSRAFFSEVERRFDAMPFTLRAFEDEKKARMGVVECAKHELLQPFNVLYEKEGEFVAQFKFTVLLMPNGPMRITSGPFEPDLYKSEMEVQDAELKALLQSSASRKTQKKKKKKASKTAENPTSGETLEENEAGD

SEQ ID NO: 6317 - DNA, 1375 bp, Homo sapien; identical to SEQ ID NO: 355

SEQ ID NO: 6318 - protein, 338 aa, Homo sapien; identical to SEQ ID NO: 356

SEQ ID NO: 6319 - DNA, 1550 bp, Homo sapien; identical to SEQ ID NO: 357

SEQ ID NO: 6320 - protein, 317 aa, Homo sapien; identical to SEQ ID NO: 358

SEQ ID NO: 6321 - DNA, 547 bp, Homo sapien; identical to SEQ ID NO: 148

SEQ ID NO: 6322 - protein, 76 aa, Homo sapien; identical to SEQ ID NO: 149

SEQ ID NO: 6323 - DNA, 2056 bp, Homo sapien
gcagccaggcgcgcactgcacagctctcttctctcgccgccgcccgagcgcacccttcagcccgcgcgccggccgtgagtcctcggtgctcgcccgccggccagacaaacagcccgcccgaccccgtcccgaccctggccgccccgagcggagcctggagcaaaatgatgcttcaacacccaggccaggtctctgcctcggaagtgagtgcttctgccatcgtcccctgcctgtcccctcctgggtcactggtgtttgaggattttgctaacctgacgccctttgtcaaggaagagctgaggtttgccatccagaacaagcacctctgccaccggatgtcctctgcgctggaatcagtcactgtcagcgacagacccctcggggtgtccatcacaaaagccgaggtagcccctgaagaagatgaaaggaaaaagaggcgacgagaaagaaataagattgcagctgcaaagtgccgaaacaagaagaaggagaagacggagtgcctgcagcttcagtattagcagagccacaggccgcctctgtggcatcaccagggtttctctgaagaagagggtctgcattttcctaaacccagtgctgctctcccatctcccatcttcctctcgcagcttgatgagccccggtgtgtcccaggagtcggagaagctggaaagtgtgaatgctgaactgaaggctcagattgaggagctcaagaacgagaagcagcatttgatatacatgctcaaccttcatcggcccacgtgtattgtccgggctcagaatgggaggactccagaagatgagagaaacctctttatccaacagataaaagaaggaacattgcagagctaagcagtcgtggtatgggggcgactggggagtcctcattgaatcctcattttatacccaaaaccctgaagccattggagagctgtcttcctgtgtacctctagaatcccagcagcagagaaccatcaaggcgggagggcctgcagtgattcagcaggcccttcccattctgccccagagtgggtcttggaccagggcaagtgcatctttgcctcaactccaggatttaggccttaacacactggccattcttatgttccagatggcccccagctggtgtcctgcccgcctttcatctggattctacaaaaaaccaggatgcccaccgttagattcaggcagcagtgtctgtacctcgggtgggagggatggggccatctccttcaccgtggctaccattgtcactcgtaggggatgtggagtgagaacagcatttagtgaagttgtgcaacggccagggttgtgctttctagcaaatatgctgttatgtccagaaattgtgtgtgcaagaaaactaggcaatgtactcttccgatgtttgtgtcacacaacactgatgtgacttttatatgctttttctcagatctggtttctaagagttttggggggcggggctgtcaccacgtgcagtatctcaagatattcaggtggccagaagagcttgtcagcaagaggaggaacagaattctcccagcgttaacacaaaatccatgggcagcatgatggcaggtcctctgttgcaaactcagttccaaagtcacaggaagaaagcagaaagttcaacttccaaagggttaggactctccactcaatgtcttaggtcaggagttgtgtctaggctggaagagccaaagaaatattccattttcctttccttgtggttgaaaccacagtcagtggagagatgtttggaacacagtcagtggagctggtggtaccaggtttagcattattggatgtcaaaagcattttttttgtcatgtagctgttttaagaaatctggcccagggtgtttgcagctgtgagaagtcactcacactggccacaaggacgctggctactgtctattaaaattctgatgtttctgtgaaattctcagagtgtttaattgtactcaatggtatcattacaattttctgtaagagaaaatattacttatttatcctagtattcctaacctgtcagaataataaatattgtggtaaaa

SEQ ID NO: 6324 - protein, 118 aa, Homo sapien
MMLQHPGQVSASEVSASAIVPCLSPPGSLVFEDFANLTPFVKEELRFAIQNKHLCHRMSSALESVTVSDRPLGVSITKAEVAPEEDERKKRRRERNKIAAAKCRNKKKEKTECLQLQY

SEQ ID NO: 6325 - DNA, 2899 bp, Homo sapien
cagacggcgctgagcgcggcggcggcgggagcggcgtcgagtgtctccgtgcgcccgtctgtggccaagcagccagcagcctagcagccagtcagcttgccgccggcggccaagcagccaaccatgctcaacttcggtgcctctctccagcagactgcggaggaaagaatggaaatgatttctgaaaggccaaaagagagtatgtattcctggaacaaaactgcagagaaaagtgattttgaagctgtagaagcacttatgtcaatgagctgcagttggaagtctgattttaagaaatacgttgaaaacagacctgttacaccagtatctgatttgtcagaggaagagaatctgcttccgggaacacctgattttcatacaatcccagcattttgtttgactccaccttacagtccttctgactttgaaccctctcaagtgtcaaatctgatggcaccagcgccatctactgtacacttcaagtcactctcagatactgccaaacctcacattgccgcacctttcaaagaggaagaaaagagcccagtatctgcccccaaactccccaaagctcaggcaacaagtgtgattcgtcatacagctgatgcccagctatgtaaccaccagacctgcccaatgaaagcagccagcatcctcaactatcagaacaattcttttagaagaagaacccacctaaatgttgaggctgcaagaaagaacataccatgtgccgctgtgtcaccaaacagatccaaatgtgagagaaacacagtggcagatgttgatgagaaagcaagtgctgcactttatgacttttctgtgccttcctcagagacggtcatctgcaggtctcagccagcccctgtgtccccacaacagaagtcagtgttggtctctccacctgcagtatctgcagggggagtgccacctatgccggtcatctgccagatggttccccttcctgccaacaaccctgttgtgacaacagtcgttcccagcactcctcccagccagccaccagccgtttgcccccctgttgtgttcatgggcacacaagtccccaaaggcgctgtcatgtttgtggtaccccagcccgttgtgcagagttcaaagcctccggtggtgagcccgaatggcaccagactctctcccattgcccctgctcctgggttttccccttcagcagcaaaagtcactcctcagattgattcatcaaggataaggagtcacatctgtagccacccaggatgtggcaagacatactttaaaagttcccatctgaaggcccacacgaggacgcacacaggagaaaagcctttcagctgtagctggaaaggttgtgaaaggaggtttgcccgttctgatgaactgtccagacacaggcgaacccacacgggtgagaagaaatttgcgtgccccatgtgtgaccggcggttcatgaggagtgaccatttgaccaagcatgcccggcgccatctatcagccaagaagctaccaaactggcagatggaagtgagcaagctaaatgacattgctctacctccaacccctgctcccacacagtgacagaccggaaagtgaagagtcagaactaactttggtctcagcgggagccagtggtgatgtaaaaatgcttccactgcaagtctgtggccccacaacgtgggcttaaagcagaagccccacagcctggcacgaaggccccgcctgggttaggtgactaaaagggcttcggccacaggcaggtcacagaaaggcaggtttcatttcttatcacataagagagatgagaaagcttttattcctttgaatattttttgaaggtttcagatgaggtcaacacaggtagcacagattttgaatctgtgtgcatatttgttactttacttttgctgtttatacttgagaccaacttttcaatgtgattcttctaaagcactggtttcaagaatatggaggctggaaggaaataaacattacggtacagacatggagatgtaaaatgagtttgtattattacaaatattgtcatctttttctagagttatcttctttattattcctagtctttccagtcaacatcgtggatgtagtgattaaatatatctagaactatcatttttacactattgtgaatatttggaattgaacgactgtatattgctaagagggcccaaagaattggaatcctccttaatttaattgctttgaagcatagctacaatttgtttttgcatttttgttttgaaagtttaacaaatgactgtatctaggcatttcattatgctttgaactttagtttgcctgcagtttcttgtgtagatttgaaaattgtataccaatgtgttttctgtagactctaagatacactgcactttgtttagaaaaaaaactgaagatgaaatatatattgtaaagaagggatattaagaatcttagataacttcttgaaaaagatggcttatgtcatcagtaaagtacctttatgttatgaggatataatgtgtgctttattgaattagaaaattagtgaccattattcacaggtggacaaatgttgtcctgttaatttataggagttttttggggatgtggaggtagttgggtagaaaaattattagaacattcacttttgttaacagtatttctcttttattctgttatatagtggatgatatacacagtggcaaaacaaaagtacattgcttaaaatatatagtgaaaaatgtcactatatcttcccatttaacattgtttttgtatattgggtgtagatttctgacatcaaaacttggacccttggaaaacaaaagttttaattaaaaaaaatccttgtgacttacaatttgcacaatatttcttttgttgtactttatatcttgtttacaataaagaattc

SEQ ID NO: 6326 - protein, 480 aa, Homo sapien
MLNFGASLQQTAEERMEMISERPKESMYSWNKTAEKSDFEAVEALMSMSCSWKSDFKKYVENRPVTPVSDLSEEENLLPGTPDFHTIPAFCLTPPYSPSDFEPSQVSNLMAPAPSTVHFKSLSDTAKPHIAAPFKEEEKSPVSAPKLPKAQATSVIRHTADAQLCNHQTCPMKAASILNYQNNSFRRRTHLNVEAARKNIPCAAVSPNRSKCERNTVADVDEKASAALYDFSVPSSETVICRSQPAPVSPQQKSVLVSPPAVSAGGVPPMPVICQMVPLPANNPVVTTVVPSTPPSQPPAVCPPVVFMGTQVPKGAVMFVVPQPVVQSSKPPVVSPNGTRLSPIAPAPGFSPSAAKVTPQIDSSRIRSHICSHPGCGKTYFKSSHLKAHTRTHTGEKPFSCSWKGCERRFARSDELSRHRRTHTGEKKFACPMCDRRFMRSDHLTKHARRHLSAKKLPNWQMEVSKLNDIALPPTPAPTQ

SEQ ID NO: 6327 - DNA, 938 bp, Homo sapien; identical to SEQ ID NO: 1459

SEQ ID NO: 6328 - protein, 125 aa, Homo sapien; identical to SEQ ID NO: 1460

SEQ ID NO: 6329 - DNA, 1935 bp, Homo sapien; identical to SEQ ID NO: 506

SEQ ID NO: 6330 - protein, 535 aa, Homo sapien; identical to SEQ ID NO: 507

SEQ ID NO: 6331 - DNA, 1821 bp, Homo sapien; identical to SEQ ID NO: 111

SEQ ID NO: 6332 - protein, 548 aa, Homo sapien; identical to SEQ ID NO: 112

SEQ ID NO: 6333 - DNA, 3448 bp, Homo sapien
gttcagcgccggcgccggtgtgcgagccgcggcagagtgaggcaggcaacccgaggtgcggagcgacctgcggaggctgagccccgctttctcccagggtttcttatcagccagccgccgctgtccccgggggagtaggaggctcctgacaggccgcggctgtctgtgtgtccttctgagtgtcagaggaacggccagaccccgcgggccggagcagaacgcggccagggcagaaagcggcggcaggagaagcaggcagggggccggaggacgcagaccgagacccgaggcggaggcggaccgcgagccggccatgtcggtggtggggttggacgtgggctcgcagagctgctacatcgcggtagcccgggccgggggcatcgagaccatcgccaatgagttcagcgaccggtgcaccccgtcagtcatatcatttggatcaaaaaatagaacaatcggagttgcagccaaaaatcagcaaatcactcatgcaaacaatacggtgtctaacttcaaaagatttcatggccgagcattcaacgaccccttcattcaaaaggagaaggaaaacttgagttacgatttggttccattgaaaaatggtggagttggaataaaggtaatgtacatgggtgaagaacatctatttagtgtggagcagataacagccatgttgttgactaagctgaaggaaactgctgaaaacagcctcaagaaaccagtaacagattgtgttatttcagtcccctccttctttacagatgctgagaggcgatctgtgttagatgctgcacagattgttggcctaaactgtttaagacttatgaatgacatgacagctgttgctttgaattacggaatttataagcaggatctcccaagcctggatgagaaacctcggatagtggtttttgttgatatgggacattcagcttttcaagtgtctgcttgtgcttttaacaagggaaaattgaaggtactgggaacagcttttgatcctttcttaggaggaaaaaacttcgatgaaaagttagtggaacatttctgtgcagaatttaaaactaagtacaagttggatgcaaaatccaaaatacgagcactcctacgtctgtatcaggaatgtgaaaaactgaaaaagctaatgagctctaacagcacagaccttccactgaatatcgaatgctttatgaatgataaagatgtttccggaaagatgaacaggtcacaatttgaagaactctgtgctgaacttctgcaaaagatagaagtacccctttattcactgttggaacaaactcatctcaaagtagaagatgtgagtgcagttgagattgttggaggcgctacacgaattccagctgtgaaggaaagaattgccaaattctttggaaaagatattagcacaacactcaatgcagatgaagcagtagccagaggatgtgcattacagtgtgcaatactttccccggcatttaaagttagagaattttccgtcacagatgcagttccttttccaatatctctgatctggaaccatgattcagaagatactgaaggtgttcatgaagtctttagtcgaaaccatgctgctcctttctccaaagttctcacctttctgagaagggggccttttgagctagaagctttctattctgatccccaaggagttccatatccagaagcaaaaataggccgctttgtagttcagaatgtttctgcacagaaagatggagaaaaatctagagtaaaagtcaaagtgcgagtcaacacccatggcattttcaccatctctacggcatctatggtggagaaagtcccaactgaggagaatgaaatgtcttctgaagctgacatggagtgtctgaatcagagaccaccagaaaacccagacactgatgcaaatgaaaaaaaagttgaccagcctccagaagctaaaaagcccaaaataaaggtggtgaatgttgagctgcctattgaagccaacttggtctggcagttagggaaagaccttcttaacatgtatattgagacagagggtaagatgataatgcaagataaattggaaaaagaaaggaatgatgctaaaaatgcagttgaggaatatgtgtatgagttcagagacaagctgtgtggaccatatgaaaaatttatatgtgagcaggatcatcaaaattttttgagactcctcacagaaactgaagactggctgtatgaagaaggagaggaccaagctaaacaagcatatgttgacaagttggaagaattaatgaaaattggcactccagttaaagttcggtttcaggaagctgaagaacggccaaaaatgtttgaagaactaggacagaggctgcagcattatgccaagatagcagctgacttcagaaataaggatgagaaatacaaccatattgatgagtctgaaatgaaaaaagtggagaagtctgttaatgaagtgatggaatggatgaataatgtcatgaatgctcaggctaaaaagagtcttgatcaggatccagttgtacgtgctcaggaaattaaaacaaaaatcaaggaattgaacaacacatgtgaacccgttgtaacacaaccgaaaccaaaaattgaatcacccaaactggaaagaactccaaatggcccaaatattgataaaaaggaagaagatttagaagacaaaaacaattttggtgctgaacctccacatcagaatggtgaatgttaccctaatgagaaaaattctgttaatatggacttggactagataaccttaaattggcctattccttcaattaataaaatatttttgccatagtatgtgactctacataacatactgaaactatttatattttcttttttaaggatatttagaaattttgtgtattatatggaaaaagaaaaaaagcttaagtctgtagtctttatgatcctaaaagggaaaattgccttggtaactttcagattcctgtggaattgtgaattcatactaagctttctgtgcagtctcaccatttgcatcactgaggatgaaactgacttttgtcttttggagaaaaaaaactgtactgttgttcaagagggctgtgattaaaatctttaagcatttgttcctgccaaggtagttttcttgcattttgctctccattcagcatgtgtgtgggtgtggatgtttataaacaagactaagtctgacttcataagggctttctaaaaccatttctgtccaagagaaaatgactttttgctttgatattaaaaattcaatgagtaaaacaaaagctagtcaaatgtgttagcagcatgcagaacaaaaactttaaactttctctctcactatacagtatattgtcaatgtgaaagtgtggaatggaagaaatgtcgatcctgttgtaactgattgtgaacacttttatgagctttaaaataaagttcatcttatggtgtcatttct

SEQ ID NO: 6334 - protein, 814 aa, Homo sapien
MSVVGLDVGSQSCYIAVARAGGIETIANEFSDRCTPSVISFGSKNRTIGVAAKNQQITHANNTVSNFKRFHGRAFNDPFIQKEKENLSYDLVPLKNGGVGIKVMYMGEEHLFSVEQITAMLLTKLKETAENSLKKPVTDCVISVPSFFTDAERRSVLDAAQIVGLNCLRLMNDMTAVALNYGIYKQDLPSLDEKPRIVVFVDMGHSAFQVSACAFNKGKLKVLGTAFDPFLGGKNFDEKLVEHFCAEFKTKYKLDAKSKIRALLRLYQECEKLKKLMSSNSTDLPLNIECFMNDKDVSGKMNRSQFEELCAELLQKIEVPLYSLLEQTHLKVEDVSAVEIVGGATRIPAVKERIAKFFGKDISTTLNADEAVARGCALQCAILSPAFKVREFSVTDAVPFPISLIWNHDSEDTEGVHEVFSRNHAAPFSKVLTFLRRGPFELEAFYSDPQGVPYPEAKIGRFVVQNVSAQKDGEKSRVKVKVRVNTHGIFTISTASMVEKVPTEENEMSSEADMECLNQRPPENPDTDANEKKVDQPPEAKKPKIKVVNVELPIEANLVWQLGKDLLNMYIETEGKMIMQDKLEKERNDAKNAVEEYVYEFRDKLCGPYEKFICEQDHQNFLRLLTETEDWLYEEGEDQAKQAYVDKLEELMKIGTPVKVRFQEAEERPKMFEELGQRLQHYAKIAADFRNKDEKYNHIDESEMKKVEKSVNEVMEWMNNVMNAQAKKSLDQDPVVRAQEIKTKIKELNNTCEPVVTQPKPKIESPKLERTPNGPNIDKKEEDLEDKNNFGAEPPHQNGECYPNEKNSVNMDLD

SEQ ID NO: 6335 - DNA, 2470 bp, Homo sapien; identical to SEQ ID NO: 1233

SEQ ID NO: 6336 - protein, 651 aa, Homo sapien; identical to SEQ ID NO: 1234

SEQ ID NO: 6337 - DNA, 2912 bp, Homo sapien
cagttgcttcagcgtcccggtgtggctgtgccgttggtcctgtgcggtcacttagccaagatgcctgaggaaacccagacccaagaccaaccgatggaggaggaggaggttgagacgttcgcctttcaggcagaaattgcccagttgatgtcattgatcatcaatactttctactcgaacaaagagatctttctgagagagctcatttcaaattcatcagatgcattggacaaaatccggtatgaaactttgacagatcccagtaaattagactctgggaaagagctgcatattaaccttataccgaacaaacaagatcgaactctcactattgtggatactggaattggaatgaccaaggctgacttgatcaataaccttggtactatcgccaagtctgggaccaaagcgttcatggaagctttgcaggctggtgcagatatctctatgattggccagttcggtgttggtttttattctgcttatttggttgctgagaaagtaactgtgatcaccaaacataacgatgatgagcagtacgcttgggagtcctcagcagggggatcattcacagtgaggacagacacaggtgaacctatgggtcgtggaacaaaagttatcctacacctgaaagaagaccaaactgagtacttggaggaacgaagaataaaggagattgtgaagaaacattctcagtttattggatatcccattactctttttgtggagaaggaacgtgataaagaagtaagcgatgatgaggctgaagaaaaggaagacaaagaagaagaaaaagaaaaagaagagaaagagtcggaagacaaacctgaaattgaagatgttggttctgatgaggaagaagaaaagaaggatggtgacaagaagaagaagaagaagattaaggaaaagtacatcgatcaagaagagctcaacaaaacaaagcccatctggaccagaaatcccgacgatattactaatgaggagtacggagaattctataagagcttgaccaatgactgggaagatcacttggcagtgaagcatttttcagttgaaggacagttggaattcagagcccttctatttgtcccacgacgtgctccttttgatctgtttgaaaacagaaagaaaaagaacaatatcaaattgtatgtacgcagagttttcatcatggataactgtgaggagctaatccctgaatatctgaacttcattagaggggtggtagactcggaggatctccctctaaacatatcccgtgagatgttgcaacaaagcaaaattttgaaagttatcaggaagaatttggtcaaaaaatgcttagaactctttactgaactggcggaagataaagagaactacaagaaattctatgagcagttctctaaaaacataaagcttggaatacacgaagactctcaaaatcggaagaagctttcagagctgttaaggtactacacatctgcctctggtgatgagatggtttctctcaaggactactgcaccagaatgaaggagaaccagaaacatatctattatatcacaggtgagaccaaggaccaggtagctaactcagcctttgtggaacgtcttcggaaacatggcttagaagtgatctatatgattgagcccattgatgagtactgtgtccaacagctgaaggaatttgaggggaagactttagtgtcagtcaccaaagaaggcctggaacttccagaggatgaagaagagaaaaagaagcaggaagagaaaaaaacaaagtttgagaacctctgcaaaatcatgaaagacatattggagaaaaaagttgaaaaggtggttgtgtcaaaccgattggtgacatctccatgctgtattgtcacaagcacatatggctggacagcaaacatggagagaatcatgaaagctcaagccctaagagacaactcaacaatgggttacatggcagcaaagaaacacctggagataaaccctgaccattccattattgagaccttaaggcaaaaggcagaggctgataagaacgacaagtctgtgaaggatctggtcatcttgctttatgaaactgcgctcctgtcttctggcttcagtctggaagatccccagacacatgctaacaggatctacaggatgatcaaacttggtctgggtattgatgaagatgaccctactgctgatgataccagtgctgctgtaactgaagaaatgccaccccttgaaggagatgacgacacatcacgcatggaagaagtagactaatctctggctgagggatgacttacctgttcagtactctacaattcctctgataatatattttcaaggatgtttttctttatttttgttaatattaaaaagtctgtatggcatgacaactactttaaggggaagataagatttctgtctactaagtgatgctgtgataccttaggcactaaagcagagctagtaatgctttttgagtttcatgttggttctttcacagatggggtaacgtgcactgtaagacgtatgtaacatgatgttaactttgtgtggtctaaagtgtttagctgtcaagccggatgcctaagtagaccaaatcttgttattgaagtgttctgagctgtatcttgatgtttagaaaagtattcgttacatcttgtaggatctactttttgaacttttcattccctgtagttgacaattctgcatgtactagtcctctagaaataggttaaactgaagcaacttgatggaaggatctctccacagggcttgttttccaaagaaaagtattgtttggaggagcaaagttaaaagcctacctaagcatatcgtaaagctgttcaaatactcgagcccagtcttgtggatggaaatgtagtgctcgagtcacattctgcttaaagttgtaacaaatacagatgagt

SEQ ID NO: 6338 - protein, 732 aa, Homo sapien
MPEETQTQDQPMEEEEVETFAFQAEIAQLMSLIINTFYSNKEIFLRELISNSSDALDKIRYETLTDPSKLDSGKELHINLIPNKQDRTLTIVDTGIGMTKADLINNLGTIAKSGTKAFMEALQAGADISMIGQFGVGFYSAYLVAEKVTVITKHNDDEQYAWESSAGGSFTVRTDTGEPMGRGTKVILHLKEDQTEYLEERRIKEIVKKHSQFIGYPITLFVEKERDKEVSDDEAEEKEDKEEEKEKEEKESEDKPEIEDVGSDEEEEKKDGDKKKKKKIKEKYIDQEELNKTKPIWTRNPDDITNEEYGEFYKSLTNDWEDHLAVKHFSVEGQLEFRALLFVPRRAPFDLFENRKKKNNIKLYVRRVFIMDNCEELIPEYLNFIRGVVDSEDLPLNISREMLQQSKILKVIRKNLVKKCLELFTELAEDKENYKKFYEQFSKNIKLGIHEDSQNRKKLSELLRYYTSASGDEMVSLKDYCTRMKENQKHIYYITGETKDQVANSAFVERLRKHGLEVIYMIEPIDEYCVQQLKEFEGKTLVSVTKEGLELPEDEEEKKKQEEKKTKFENLCKIMKDILEKKVEKVVVSNRLVTSPCCIVTSTYGWTANMERIMKAQALRDNSTMGYMAAKKHLEINPDHSIIETLRQKAEADKNDKSVKDLVILLYETALLSSGFSLEDPQTHANRIYRMIKLGLGIDEDDPTADDTSAAVTEEMPPLEGDDDTSRMEEVD

SEQ ID NO: 6339 - DNA, 1438 bp, Homo sapien; identical to SEQ ID NO: 121

SEQ ID NO: 6340 - protein, 397 aa, Homo sapien; identical to SEQ ID NO: 120

SEQ ID NO: 6341 - DNA, 2156 bp, Homo sapien
cccggcctcccgcacgccccgcaggtagcgcccccgcccgcggcccagagtgcgctcgcgccggcaccagctcccggataaacggcgcgccgcgcggagatgacagccgaggagatgaaggcgaccgagagcggggcgcagtcggcgccgctgcccatggagggagtggacatcagccccaaacaggacgaaggcgtgctgaaggtcatcaagagagagggcacaggtacagagatgcccatgattggggaccgagtctttgtccactacactggctggctattagatggcacaaagtttgactccagtctggatcgcaaggacaaattctcctttgacctgggaaaaggggaggtcatcaaggcttgggacattgccatagccaccatgaaggtgggggaggtgtgccacatcacctgcaaaccagaatatgcctacggttcagcaggcagtcctccaaagattccccccaatgccacgcttgtatttgaggtggagttgtttgagtttaagggagaagatctgacggaagaggaagatggcggaatcattcgcagaatacagactcgcggtgaaggctatgctaagcccaatgagggtgctatcgtggaggttgcactggaagggtactacaaggacaagctctttgaccagcgggagctccgctttgagattggcgagggggagaacctggatctgccttatggtctggagagggccattcagcgcatggagaaaggagaacattccatcgtgtacctcaagcccagctatgcttttggcagtgttgggaaggaaaagttccaaatcccaccaaatgctgagctgaaatatgaattacacctcaagagttttgaaaaggccaaggagtcttgggagatgaattcagaagagaagctggaacagagcaccatagtgaaagagcggggcactgtgtacttcaaggaaggtaaatacaagcaagctttactacagtataagaagatcgtgtcttggctggaatatgagtctagtttttccaatgaggaagcacagaaagcacaggcccttcgactggcctctcacctcaacctggccatgtgtcatctgaaactacaggccttctctgctgccattgaaagctgtaacaaggccctagaactggacagcaacaacgagaagggcctcttccgccggggagaggcccacctggccgtgaatgactttgaactggcacgggctgatttccagaaggtcctgcagctctaccccaacaacaaagccgccaagacccagctggctgtgtgccagcagcggatccgaaggcagcttgcccgggagaagaagctctatgccaatatgtttgagaggctggctgaggaggagaacaaggccaaggcagaggcttcctcaggagaccatcccactgacacagagatgaaggaggagcagaagagcaacacggcagggagccagtctcaggtggagacagaagcatagcccctctccaccagccctactcctgcggctgcctgccccccagtctccccactccaccctgttagttttgtaaaaactgaagaattttgagtgaattagacctttatttttctatctggttggatggtggctttaggggaagggggaaaggtgtaggctgggggattgaggtggggaatcattttagctggtgtcagcccctcttcccttcctccattgcacatgaacatatgtccatccatatatattcatcagaatgttaatttattttgctccctctgttaggtccattttctaagggtagaagaggcaagtggtagggatgaggtctgataagaacccagggtggagagggagactcctgggcagccgttttcctcatcctttccctctcccagtccatttccaaatgtggcctccatgtgggtgctagggacatgggaaaaaccactgctatgccatttcttctctctgttcccttcctcacccccgacggtgtggctgatgatgtcttctggtgtcatggtgaccaccccctgttccctgttctggtatttcccctgtcagtttcccctctcggccaggttgtgtcccaaaatcccctcagcctcttctctgcacgttgctgaaggtccaggcttgcctcaagttccatgcttgagcaataaagtggaaac

SEQ ID NO: 6342 - protein, 459 aa, Homo sapien; identical to SEQ ID NO: 126

SEQ ID NO: 6343 - DNA, 1763 bp, Homo sapien; identical to SEQ ID NO: 285

SEQ ID NO: 6344 - protein, 114 aa, Homo sapien; identical to SEQ ID NO: 286

SEQ ID NO: 6345 - DNA, 1540 bp, Homo sapien
caaaggccaggcctgacggaagagcccagccttcgccgagggccgcagggagccagagactcgagcctgcggttccagccccgccgcggttccggccccgccgcgatcccgaggcctgcgcatgctcggtgctgcgcggggctccctccttaccgcaggagctcctcatcgagaaacccaggttggtgtcttttccacgtggtagaagctggctaacctccacttccacattccagcccaagggaaagtccaaggtattgttgcagcatctggcagtgagactgaggatgaggacagcatggacattcccttggacctttcttcatccgctggctcaggcaagagaaggagaaggggcaacctacccaaggagtctgtgcagattcttcgggattggctgtatgagcaccgttacaatgcctatccttcagagcaagaaaaagcgttgctgtcccagcaaacacacctgtctacgctacaggtctgtaactggttcatcaacgcccgccgcaggctcctccctgacatgctgagaaaggatggcaaagatccaaatcagttcacaatttcccgccgtggggccaagatttctgaaacgagctctgtggagtccgtgatgggcatcaaaaacttcatgccagctctagaggagaccccatttcattcctgtacagctgggccaaacccaaccctagggaggccactgtctcctaagccgtcatccccgggatcagttttggctcgtccatcagtgatctgccataccactgtgactgcattgaaagatgtccctttctctctctgccagtcggtcggtgtgggacaaaacacagatatacagcagatagcggccaaaaacttcacagacacctctctcatgtacccagaggacacttgtaaatctggaccaagtacgaatacacagagtggtcttttcaacactcctccccctactccaccggacctcaaccaggacttcagtggatttcagcttctagtggatgttgcactcaaacgggctgcagagatggagcttcaggcaaaacttacagcttaacccattttcaagcaaaacagttctcagaaatgtcatgattgccggggtgaaggcaagagatgaattgcattattttatatattttttattaatatttgcacatgggattgctaaaacagcttcctgttactgagatgtcttcaatggaatacagtcattccaagaactataaacttaaagctactgtagaaacaaagggttttcttttttaaatgtttcttggtagattattcataatgtgagatggttcccaatatcatgtgattttttttttcctccccttccctttttttgttattttttcagactgtgcaatacttagagaacctatagcatcttctcattcccatgtggaacaggatgcccacatactgtctaattaataaattttccattttttttcaaacaagtatgaatctagttggttgatgccttttttttcatgacataataaagtattttctttaaaaaaaaaaaaaaaaa

SEQ ID NO: 6346 - protein, 252 aa, Homo sapien
MDIPLDLSSSAGSGKRRRRGNLPKESVQILRDWLYEHRYNAYPSEQEKALLSQQTHLSTLQVCNWFINARRRLLPDMLRKDGKDPNQFTISRRGAKISETSSVESVMGIKNFMPALEETPFHSCTAGPNPTLGRPLSPKPSSPGSVLARPSVICHTTVTALKDVPFSLCQSVGVGQNTDIQQIAAKNFTDTSLMYPEDTCKSGPSTNTQSGLFNTPPPTPPDLNQDFSGFQLLVDVALKRAAEMELQAKLTA

SEQ ID NO: 6347 - DNA, 1702 bp, Homo sapien; identical to SEQ ID NO: 1223

SEQ ID NO: 6348 - protein, 314 aa, Homo sapien; identical to SEQ ID NO: 1224

SEQ ID NO: 6349 - DNA, 4432 bp, Homo sapien
gggaagcgcgccgcgcacctcatggttccggggacagttagggcggcggatggaggtcagcggtggtgctcgctgcggtttggaatcacttgctaggagtcttgtctctctgccacccaggacatcatggcagctcacctggtaaagcgatgcacgtgcctcctgagagaagctgctcgtcaggcccctgccatggctccagttggccgactgagacttgcctgggtagcccataagactctgacttcctcagccacctcacccatttcccacctcccaggttccttgatggagccggtggagaaggaacgagcatctactccctacatagagaagcaggtggaccacctcatcaagaaggccacaaggccagaggagctcctggagctacttggtggcagtcacgacttggacagcaatcaagcagcaatggtacttatccggctctctcacttgctgtctgagaagccagaagataaaggcttgctcatacaggatgcccactttcatcaacttctctgtctgctcaacagtcagattgcctcggtctggcatggtaccctctcgaagctgctgggaagcctgtatgctctgggcatccccaaggcctccaaggagctgcagtcggtggagcaggaggtccgctggcgcatgcggaagctcaagtacaagcacctggccttcctggcagagtcctgtgccaccctctcacaggagcagcactcgcaggagctgctggctgagctgctcacacacctggaaaggcgttggacagaaattgaagattcccacacattagtgaccgtcatgatgaaggtgggacacctctcggagccactaatgaaccgcctggaagacaagcacgtcctgaacagagcgcaggacatcaccctgccccacctgtgcagcgtacttctggcttttgcgcgtctgaacttccatccagaccaagaggatcagttcttcagcctggtacatgagaagctggggtcagagctgccaggcctggagccagccctgcaggtggacctggtgtgggccctgtgtgtgctgcagcaggcacgggaagcagagctgcaagccgtcctccaccctgaatttcacatccaatttctagggggcaagtctcagaaggatcagaacaccttccagaagctgctccacatcaacgccactgccctgctggagtaccccgagtactcgggtccccttctgcctgcctcggctgtggcccctgggccctcagcccttgacaggaaggtgacccccctgcaaaaggagctgcaggagacgctgaaggggctgctggggagcgccgacaagggcagcctcgaggtggccacgcagtatggctgggtgctggatgctgaggtgctgctggacagtgacggcgagtttctgcccgtaagggactttgtggcacctcaccttgcccagccaactgggagccagtcaccacctccagggtctaagaggctagcgttcttgcggtgggagttccccaacttcaacagccgaagcaaggacttgctgggtcgctttgttctggcccggcgacacatagtggctgcaggcttcctgatagtggacgtcccattctatgagtggctggaactcaagtctgaatggcagaaaggcgcctacctcaaggacaagatgcgcaaagcggtggctgaggagctggccaagtgacttgtgccagcagcatggactgcgtgcctctccgccggaggtctagctgtgggcggccaagaagggtcacccttgaggacaaacctctgtgcaggaccttggccagagtggggagggtggccagccactctgagggacagaacgtcctcttgtgtataataaacctttaattttggtgttggacccctggggccttcccaggcttggtcaccctctgcactgtcagcacttgtctgtctgctttgttgagcagggcgtggttctccagtctgccctgtgcactcccccgccacgcccagcccaagagggctgctttagggacagacctgggttgttacctgcctgtctctcccagcttcttccctccatgagtgcttattcacatatgccggcctcttgcgtaggggtctgtatcagccccagcaggcaggtggagtcctagaattctgaacctccagagcagaggagcttcccagggaagctgattggagattcagtgcatggctgggggttctgatggagctgtggctactgaaccacagccatcctgggaggctttctcccatcagttgtctcacacttagctgagtgaaaggcaccctgacagcatgtggtgacaggtgatgtgagggctgggtgagcacttgggaggcgctggctctgggagaggagaagatcccacttggctgacaccacggcaccaagagccaaactccatcgttgtcttcaccaccctgaccagagccttgtgctgtcatctaggaactggctgcccaaacaggaccctggcagcctccctgctgctgcggggattaccaggtgctgggaggcaacaagctttctaccttccagcctctccttagagacacctattggcagaacctgactaaatagcagtcagggaactgggttgcctccagccatacagaacagagagtaggacagtggggtggagctgagatggagaggcccacagccctcagcactgtaggctcccaaccctaggctgtttccccaaaaagaaaaagtctagtcactgctctgatgcttggccactcacccaagcattggggtagtttgtgctggcttcactgggcaccatcaggcacacccagcctgtagtttttgttttatattacctaagtcggccaggtgtggtgggatcacgcctgtaatcccagcacttagggaggctggggcgggcgaatcgcctgaggccaggaattcaagaccaacctggccaacattgtgaaaccctgtctctactaaaaatataaaaattagtcgggcatgatgacaggcacctgtaatcccagctactcaggaggctgaggcaggtgaatcacttgaacccgggaggtggaggctgcagtgagttaagattgtgccactgcactccagcctgggtaacagagcaagactctgtctcaaaaaatatatatgtgtgtgtgtgtgtgtgtatatatatgtacatgtgtatataagtatatatgtgtgtatatatgtatatatacacgtatatacacacacacccctaagtcatgattttggagcaattgtaagtggtgtagtgcttaattttggcattcacacattgattgttagcatatagaaatgggattgatttttatgtgatcttgctaaactttatgcatttttaaaattcctttggatttcctatgtagatatttatgtcctgaaaacaggaatgtatttatcctttcaaatcaatatgctttttattttgttatttatgaccacttcattaaaatataattcacatgccatacacttcacccatttaaaatgtataattaggccaggtgtggtggctcacgtctgtaatcccagcagtttgggaggccaaggccctcagatcttgagcccaggagttcaagaccaccctgggcaacaggcaaaaccctgtctctattttttaaaatacaagaattagccgcagtggcacgcacctgtcgtcccagcaacccaggaggctgaggtaggaggatcacttaagcctgggaagtcaagcctgcagtgaaccatgatagcaccactgcagtccagcctgggcgacagagtgagaccccatctcgaaaacaaaaatgtataattcagtggtttttagtctctttgcagatacatgcaaccatcaccacaatttgcacattttctaagcctcatatactgatgtgatattttggtgttttgtgactggcttcatttacttagcatattgttttcatgtttcattcatgtcgcatgtatgagtattcattcctttatttggctgaataatattccattatagtttgtgccacattttgtttatccattcatccattgatggacatgtggattgtttccaccttctggataatatgaactgatacagtttggatattttgtcccctccaaatctcatgaaataggatcaccagtgttggagaatggggcctgttaggaagtgtttggatcataggaacatctgtcataaatggcttggtgccatccttgtaatgagtgagttcttgctctatattagttcacttgaaagctggttgttgggaactcctgccctatctgttctgccctctctcgtcatgtgacatgcctgctccttgttcaccttctgtcatgagtaaaagcttcctaaggccttcccaggagccaagcagatgtcagtaccatgcttgtacagcctgcagaactgtgagccaaataaacttctttataaatt

SEQ ID NO: 6350 - protein, 521 aa, Homo sapien
MAAHLVKRCTCLLREAARQAPAMAPVGRLRLAWVAHKTLTSSATSPISHLPGSLMEPVEKERASTPYIEKQVDHLIKKATRPEELLELLGGSHDLDSNQAAMVLIRLSHLLSEKPEDKGLLIQDAHFHQLLCLLNSQIASVWHGTLSKLLGSLYALGIPKASKELQSVEQEVRWRMRKLKYKHLAFLAESCATLSQEQHSQELLAELLTHLERRWTEIEDSHTLVTVMMKVGHLSEPLMNRLEDKHVLNRAQDITLPHLCSVLLAFARLNFHPDQEDQFFSLVHEKLGSELPGLEPALQVDLVWALCVLQQAREAELQAVLHPEFHIQFLGGKSQKDQNTFQKLLHINATALLEYPEYSGPLLPASAVAPGPSALDRKVTPLQKELQETLKGLLGSADKGSLEVATQYGWVLDAEVLLDSDGEFLPVRDFVAPHLAQPTGSQSPPPGSKRLAFLRWEFPNFNSRSKDLLGRFVLARRHIVAAGFLIVDVPFYEWLELKSEWQKGAYLKDKMRKAVAEELAK

SEQ ID NO: 6351 - DNA, 4484 bp, Homo sapien; identical to SEQ ID NO: 530

SEQ ID NO: 6352 - protein, 1116 aa, Homo sapien; identical to SEQ ID NO: 531

SEQ ID NO: 6353 - DNA, 2032 bp, Homo sapien
actcagtgttcgcgggagcgccgcacctacaccagccaacccagatcccgaggtccgacagcgcccggcccagatccccacgcctgccaggagcaagccgagagccagccggccggcgcactccgactccgagcagtctctgtccttcgacccgagccccgcgccctttccgggacccctgccccgcgggcagcgctgccaacctgccggccatggagaccccgtcccagcggcgcgccacccgcagcggggcgcaggccagctccactccgctgtcgcccacccgcatcacccggctgcaggagaaggaggacctgcaggagctcaatgatcgcttggcggtctacatcgaccgtgtgcgctcgctggaaacggagaacgcagggctgcgccttcgcatcaccgagtctgaagaggtggtcagccgcgaggtgtccggcatcaaggccgcctacgaggccgagctcggggatgcccgcaagacccttgactcagtagccaaggagcgcgcccgcctgcagctggagctgagcaaagtgcgtgaggagtttaaggagctgaaagcgcgcaataccaagaaggagggtgacctgatagctgctcaggctcggctgaaggacctggaggctctgctgaactccaaggaggccgcactgagcactgctctcagtgagaagcgcacgctggagggcgagctgcatgatctgcggggccaggtggccaagcttgaggcagccctaggtgaggccaagaagcaacttcaggatgagatgctgcggcgggtggatgctgagaacaggctgcagaccatgaaggaggaactggacttccagaagaacatctacagtgaggagctgcgtgagaccaagcgccgtcatgagacccgactggtggagattgacaatgggaagcagcgtgagtttgagagccggctggcggatgcgctgcaggaactgcgggcccagcatgaggaccaggtggagcagtataagaaggagctggagaagacttattctgccaagctggacaatgccaggcagtctgctgagaggaacagcaacctggtgggggctgcccacgaggagctgcagcagtcgcgcatccgcatcgacagcctctctgcccagctcagccagctccagaagcagctggcagccaaggaggcgaagcttcgagacctggaggactcactggcccgtgagcgggacaccagccggcggctgctggcggaaaaggagcgggagatggccgagatgcgggcaaggatgcagcagcagctggacgagtaccaggagcttctggacatcaagctggccctggacatggagatccacgcctaccgcaagctcttggagggcgaggaggagaggctacgcctgtcccccagccctacctcgcagcgcagccgtggccgtgcttcctctcactcatcccagacacagggtgggggcagcgtcaccaaaaagcgcaaactggagtccactgagagccgcagcagcttctcacagcacgcacgcactagcgggcgcgtggccgtggaggaggtggatgaggagggcaagtttgtccggctgcgcaacaagtccaatgaggaccagtccatgggcaattggcagatcaagcgccagaatggagatgatcccttgctgacttaccggttcccaccaaagttcaccctgaaggctgggcaggtggtgacgatctgggctgcaggagctggggccacccacagcccccctaccgacctggtgtggaaggcacagaacacctggggctgcgggaacagcctgcgtacggctctcatcaactccactggggaagaagtggccatgcgcaagctggtgcgctcagtgactgtggttgaggacgacgaggatgaggatggagatgacctgctccatcaccaccacgtgagtggtagccgccgctgaggccgagcctgcactggggccacccagccaggcctgggggcagcctctccccagcctccccgtgccaaaaatcttttcattaaagaatgttttggaacttt

SEQ ID NO: 6354 - protein, 572 aa, Homo sapien
METPSQRRATRSGAQASSTPLSPTRITRLQEKEDLQELNDRLAVYIDRVRSLETENAGLRLRITESEEVVSREVSGIKAAYEAELGDARKTLDSVAKERARLQLELSKVREEFKELKARNTKKEGDLIAAQARLKDLEALLNSKEAALSTALSEKRTLEGELHDLRGQVAKLEAALGEAKKQLQDEMLRRVDAENRLQTMKEELDFQKNIYSEELRETKRRHETRLVEIDNGKQREFESRLADALQELRAQHEDQVEQYKKELEKTYSAKLDNARQSAERNSNLVGAAHEELQQSRIRIDSLSAQLSQLQKQLAAKEAKLRDLEDSLARERDTSRRLLAEKEREMAEMRARMQQQLDEYQELLDIKLALDMEIHAYRKLLEGEEERLRLSPSPTSQRSRGRASSHSSQTQGGGSVTKKRKLESTESRSSFSQHARTSGRVAVEEVDEEGKFVRLRNKSNEDQSMGNWQIKRQNGDDPLLTYRFPPKFTLKAGQVVTIWAAGAGATHSPPTDLVWKAQNTWGCGNSLRTALINSTGEEVAMRKLVRSVTVVEDDEDEDGDDLLHHHHVSGSRR

SEQ ID NO: 6355 - DNA, 3615 bp, Homo sapien
ggactgtgtgtgtctggctgtagcagacgcgaggcggcgacgaggcgccggggacccgcgcgaggggcggccgggaggcggcggcggcggccgccagaagtagcagcaggaccggcggcggcgacggcagccctgaaatgcattttcctctccagcggccatgttaaccaggaaaccttcggccgccgctcccgccgcctacccgaccggccgaggtggggacagcgccgttcgtcagcttcaggcttccccggggctcggtgcagggcccacccggagcggagtggggactggcccgccctcccccatcgccctgccgcctctccgggccagcaacgctgccgccgcagcccacacgattggcggcagtaagcacacaatgaatgatcacctgcatgtcggcagccacgctcacggacagatccaggttcaacagttgtttgaggataacagtaacaagcggacagtgctcacgacacaaccaaatgggcttacaacagtgggcaaaacgggcttgccagtggtgccagagcggcagctggacagcattcatagacggcaggggagctccacctctctaaagtccatggaaggcatggggaaggtgaaagccacccccatgacacctgaacaagcaatgaagcaatacatgcaaaaactcacagccttcgaacaccatgagattttcagctaccctgaaatatatttcttgggtctaaatgctaagaagcgccagggcatgacaggtgggcccaacaatggtggctatgatgatgaccagggatcatatgtgcaggtgccccacgatcacgtggcttacaggtatgaggtcctcaaggtcattgggaaggggagctttgggcaggtggtcaaggcctacgatcacaaagtccaccagcacgtggccctaaagatggtgcggaatgagaagcgcttccaccggcaagcagcggaggagatccgaatcctggaacacctgcggaagcaggacaaggataacacaatgaatgtcatccatatgctggagaatttcaccttccgcaaccacatctgcatgacgtttgagctgctgagcatgaacctctatgagctcatcaagaagaataaattccagggcttcagtctgcctttggttcgcaagtttgcccactcgattctgcagtgcttggatgctttgcacaaaaacagaataattcactgtgaccttaagcccgagaacattttgttaaagcagcagggtagaagcggtattaaagtaattgattttggctccagttgttacgagcatcagcgtgtctacacgtacatccagtcgcgtttttaccgggctccagaagtgatccttggggccaggtatggcatgcccattgatatgtggagcctgggctgcattttagcagagctcctgacgggttaccccctcttgcctggggaagatgaaggggaccagctggcctgtatgattgaactgttgggcatgccctcacagaaactgctggatgcatccaaacgagccaaaaattttgtgagctccaagggttatccccgttactgcactgtcacgactctctcagatggctctgtggtcctaaacggaggccgttcccggagggggaaactgaggggcccaccggagagcagagagtgggggaacgcgctgaaggggtgtgatgatccccttttccttgacttcttaaaacagtgtttagagtgggatcctgcagtgcgcatgaccccaggccaggctttgcggcacccctggctgaggaggcggttgccaaagcctcccaccggggagaaaacgtcagtgaaaaggataactgagagcaccggtgctatcacatctatatccaagttacctccaccttctagctcagcttccaaactgaggactaatttggcgcagatgacagatgccaatgggaatattcagcagaggacagtgttgccaaaacttgttagctgagctcacgtcccctgatgctggtaacctgaaagatacgacattgctgagccttactgggttgaaaaggagtagctcagacctgtttttatttgctcaataactctactcatttgtatcttttcagcacttaattttaatgtaagaaagttgttcattttgtttttataaaatacatgaggacaatgctttaagtttttatactttcagaaactttttgtgttctaaaagtacaatgagccttactgtatttagtgtggcagaataataacatcagtggcaggccactgattacttcatgactgccacgcatttacagattggtgtcaaagacattcactatgtttttatggttcatgttatatcctccccagggtgacagccccttaaggccctccttttccctccatgctccaggtccatgcacaggtgtagcatgtcctgcttccgtttttcataaattaatctgggtgttgggggtagtgggaggagaacggtcagaatcaaagtgacattctaagaaaaactgtaccttagagattttcctctagtgctcaaacaaatacaaaataagatccccaaggtttaaactgcccagttagcattctgacattctaaaagccggcaaagcagcttttagtggataaatgggaatggaaacgtgtgtgttcctccaaattttctagtatgatcggtgagctgttttgtaaagaagcctcatattacagagttgcttttgcacctaaatttagaattgtattccatgaactgttcctcccttttctctgcttttctcctctctgttcctcttttaataccacacgtctgttgcttgcatttagtttgtcttcttccttcagctgtgtatcccagactgttaatacagaaaagagacatttcagctgtgattatgaccattgtttcatattccaattaaaaaaagaacagcagcctagctacttaaggtggggatttcatagttccaaagaagatttagcagattagagtgagttcacacttttcaggtgccactgtaaggttctctcagcctgggaaactatcaactctttctttaaaaagaaagagggttgaaaatcctctggacgaacagaagtcactttggctgttcagtaaggccaatgttaacaacacgtttagaggaggaaaagttcaacctcaagttaaatggtttgacttattcttcgtatcattagaagaaccccagagatagcattcctctattttattttactttcttttggattgcactgattgtttttgtgggaatgacactttatctggcaaagtaactgagagtttggtaaaagaatattttcttctctgaataataattattttcacagtgaaaatttcagtattttatcactaatgtatgagcaatgatctatatcaatttcaaggcacgtgaaaaaaattttttagtatgtgcaatttaatatagaaagatttctgcctgtttggacaataggttttgggtagtacagattaggataagtaagcttatatatgcacagagattattgtattacctgtaaattgatttacaagtacttaaaagcgtggtccccagtgaggccaagaaagtttccggttaagttctttaataataatcctacagtttatcttaagaa

SEQ ID NO: 6356 - protein, 601 aa, Homo sapien
MLTRKPSAAAPAAYPTGRGGDSAVRQLQASPGLGAGPTRSGVGTGPPSPIALPPLRASNAAAAAHTIGGSKHTMNDHLHVGSHAHGQIQVQQLFEDNSNKRTVLTTQPNGLTTVGKTGLPVVPERQLDSIHRRQGSSTSLKSMEGMGKVKATPMTPEQAMKQYMQKLTAFEHHEIFSYPEIYFLGLNAKKRQGMTGGPNNGGYDDDQGSYVQVPHDHVAYRYEVLKVIGKGSFGQVVKAYDHKVHQHVALKMVRNEKRFHRQAAEEIRILEHLRKQDKDNTMNVIHMLENFTFRNHICMTFELLSMNLYELIKKNKFQGFSLPLVRKFAHSILQCLDALHKNRIIHCDLKPENILLKQQGRSGIKVIDFGSSCYEHQRVYTYIQSRFYRAPEVILGARYGMPIDMWSLGCILAELLTGYPLLPGEDEGDQLACMIELLGMPSQKLLDASKRAKNFVSSKGYPRYCTVTTLSDGSVVLNGGRSRRGKLRGPPESREWGNALKGCDDPLFLDFLKQCLEWDPAVRMTPGQALRHPWLRRRLPKPPTGEKTSVKRITESTGAITSISKLPPPSSSASKLRTNLAQMTDANGNIQQRTVLPKLVS

SEQ ID NO: 6357 - DNA, 1488 bp, Homo sapien; identical to SEQ ID NO: 329

SEQ ID NO: 6358 - protein, 463 aa, Homo sapien; identical to SEQ ID NO: 330

SEQ ID NO: 6359 - DNA, 1025 bp, Homo sapien
ggcacgagtggcggcagaggcagtgcggatccggcgttctccactgatcttttccaaggctgtacagacatggcggcggcttttcggaaggcggctaagtcccggcagcgggaacacagagagcgaagcgagcctggctttcgaaaacatctgggcctgctggagaaaaagaaagattacaaacttcgtgcagatgactaccgtaaaaaacaagaatacctcaaagctcttcggaagaaggctcttgaaaaaaatccagatgaattctactacaaaatgactcgggttaaactccaggatggagtacatattattaaggagactaaggaagaagtaaccccagaacaactaaagctgatgagaactcaggacgtcaaatatatagaaatgaagagggttgcagaagctaagaaaatcgaaagactaaaatcagagctccatctgctggatttccaggggaagcaacagaacaagcatgtgttcttttttgacaccaaaaaggaagttgaacagtttgatgtcgcaactcacctgcaaacagccccggagctagtcgacagagtctttaataggcccaggatagagaccttgcagaaagaaaaagtgaaaggagttaccaatcagactggacttaagcgaatagctaaagaaaggcaaaagcagtataactgcctgacacagcggattgaacgagagaagaaattgttcgttattgctcagaaaattcaaacacgcaaagatcttatggataaaactcagaaagtgaaggtgaagaaagaaacggtgaactccccagctatttataaatttcagagtcgtcgaaaacgttgacgtgttatagataagccttgtcattctgtatcaaaaatctgttgtcgttttctagtaacttcaaattccattactccaaatggcatggttttccggtttgtaaccataactaaattgtcagtctgacatttaatgtctttctatggacaacattaaatctccctcccttctgtaattgtttttggattgtgaaa

SEQ ID NO: 6360 - protein, 253 aa, Homo sapien
MAAAFRKAAKSRQREHRERSEPGFRKHLGLLEKKKDYKLRADDYRKKQEYLKALRKKALEKNPDEFYYKMTRVKLQDGVHIIKETKEEVTPEQLKLMRTQDVKYIEMKRVAEAKKIERLKSELHLLDFQGKQQNKHVFFFDTKKEVEQFDVATHLQTAPELVDRVFNRPRIETLQKEKVKGVTNQTGLKRIAKERQKQYNCLTQRIEREKKLFVIAQKIQTRKDLMDKTQKVKVKKETVNSPAIYKFQSRRKR

SEQ ID NO: 6361 - DNA, 1938 bp, Homo sapien
attccggttgttgcaccatggcgtccatggggaccctcgccttcgatgaatatgggcgccctttcctcatcatcaaggatcaggaccgcaagtcccgtcttatgggacttgaggccctcaagtctcatataatggcagcaaaggctgtagcaaatacaatgagaacatcacttggaccaaatgggcttgataagatgatggtggataaggatggagatgtgactgtaactaatgatggggccaccatcttaagcatgatggatgttgatcatcagattgccaagctgatggtggaactgtccaagtctcaggatgatgaaattggagatggaaccacaggagtggttgtcctggctggtgccttgttagaagaagcggagcaattgctagaccgaggcattcacccaatcagaatagccgatggctatgagcaggctgctcgtgttgctattgaacacctggacaagatcagcgatagcgtccttgttgacataaaggacaccgaacccctgattcagacagcaaaaaccacgctgggctccaaagtggtcaacagttgtcaccgacagatggctgagattgctgtgaatgccgtcctcactgtagcagatatggagcggagagacgttgactttgagcttatcaaagtagaaggcaaagtgggcggcaggctggaggacactaaactgattaagggcgtgattgtggacaaggatttcagtcacccacagatgccaaaaaaagtggaagatgcgaagattgcaattctcacatgtccatttgaaccacccaaaccaaaaacaaagcataagctggatgtgacctctgtcgaagattataaagcccttcagaaatacgaaaaggagaaatttgaagagatgattcaacaaattaaagagactggtgctaacctagcaatttgtcagtggggctttgatgatgaagcaaatcacttacttcttcagaacaacttgcctgcggttcgctgggtaggaggacctgaaattgagctgattgccatcgcaacaggagggcggatcgtccccaggttctcagagctcacagccgagaagctgggctttgctggtcttgtacaggagatctcatttgggacaactaaggataaaatgctggtcatcgagcagtgtaagaactccagagctgtaaccatttttattagaggaggaaataagatgatcattgaggaggcgaaacgatcccttcacgatgctttgtgtgtcatccggaacctcatccgcgataatcgtgtggtgtatggaggaggggctgctgagatatcctgtgccctggcagttagccaagaggcggataagtgccccaccttagaacagtatgccatgagagcgtttgccgacgcactggaggtcatccccatggccctctctgaaaacagtggcatgaatcccatccagactatgaccgaagtccgagccagacaggtgaaggagatgaaccctgctcttggcatcgactgtttgcacaaggggacaaatgatatgaagcaacagcatgtcatagaaaccttgattggcaaaaagcaacagatatctcttgcaacacaaatggttagaatgattttgaagattgatgacattcgtaagcctggagaatctgaagaatgaagacattgagaaaactatgtagcaagatccacttctgtgattaagtaaatggatgtctcgtgatgcatctacagttatttattgttacatccttttccagacactgtagatgctataataaaaatagctgtttggtaaccatagtttcacttgttcaaagctgtgtaatcgtgggggtaccatctcaactgcttttgtattcattgtattaaaagaatctgtttaaacaacctttatcttctcttcgggtttaagaaacgtttattgtaacagtaattaaatgctgccttaattg

SEQ ID NO: 6362 - DNA, 2391 bp, Homo sapien; identical to SEQ ID NO: 2337

SEQ ID NO: 6363 - protein, 701 aa, Homo sapien [sequence omitted]

SEQ ID NO: 6364 - DNA, 2365 bp, Homo sapien; identical to SEQ ID NO: 2058

SEQ ID NO: 6365 - protein, 443 aa, Homo sapien; identical to SEQ ID NO: 2059

SEQ ID NO: 6366 - DNA, 2945 bp, Homo sapien; identical to SEQ ID NO: 695

SEQ ID NO: 6367 - protein, 351 aa, Homo sapien; identical to SEQ ID NO: 696

SEQ ID NO: 6368 - DNA, 6381 bp, Homo sapien
cgcggccgctatatataatgcagcatcacaccatgtagggcatttactcttattttatacattcagatatgtttgaaacattcttaaggctacaaaacagaacatagaaaaataaacaggaatatattcaacacttacaaaaagtgatatgataaagaatataaagtactagtttccttttaacacttcaaaagatatgtatatatacttttttttacaagtaacatcacaaatgctcacatcttcacatgctcttaaagtattatttgtactcagtgtaaggctattatcgtttttcatacataaaattttctagctctgtaacacaatgcaatttttaatccattcagtaagttcaaccccaaagttgccgcttcccagcattaagacatgcacccacccctcttctaagattttctaaacttgtatttcggggagaaagacctcttttaaaaaataatccaattagtgggagagtaaatggctgacattagtagcaaaaccttagttatctgaaaataacatattggaaatgagacattattaggattttaaacaaacaatagcatttagacataaagtaggaagcaaaatacagtaaacagaaatagtgtagccaaatatcattctcttcagctaccttaagtaaaagacaaaacatttacctcatctaaaaatgaaggtaaaacgaaagaggcaaaaataaatattgctagtttctaggatggctgaatgttttctaaaccagaaatggttagaaaggaactttattgcaccaagtcaatcataagcaagtttgcagttcacaggcattttaattcaaccttgagtcacaaaggagaacaacacgctgcgagaatacagtctacagtctgcattaaataagaatatatcagcattgtggtctgggaaaacctatgcttgccaggacaaggcagggtgctgagcttaggtcatgccatgaaaatgaatttgtgggttatcagtaaacagtatgaggactacacagatgccagcatcctgctgccaaggagacatggggcaagagttgaagatttgagaggaaatgaagagacatacacaacaccaaaggaaaagggggctggaatcaagttcagccaaagcacctaacacaaaaaacaggtgagctttggtcagtctgttcttcaaaatatgtatgatcatatggtaatgaagtttcataatttccaactcaaaaatacaaatgatcctcagttctatacttttgcctctattctcttataaagaaatatgtcaacataacagtatgacataacagttaaaataaggacaaaagcttgcttatcttagtttgacctcagcataaggcaaaatcccctggagaatacatttaaaaacaaacttaaaaggaaaaaaagcgaaaccaacttcatgcaaagattccttttaaaactatcaaaagtcagttcttttattccagaggtcactgagaaaagtaccatctgctaaaattctctttcaagcacttcttccatcatatcctagaggtgagatatgggaaacagaaagcaaatcagtgttcctcaggagctatatctgttactcaattgagggtaagacaaagtgacaatgaagatatgagtagtatttccttccaatttttaaagattttcagaagctgagatcaaaccccactcaataaaatgcaggagactagaagcaacaacttattttggactcctgagatcaaacacattgaactttcaaatctgggtgtttctatcaaaatgtgattttcataaaatcagtaagctagtcctacataaaaaagcatgagctgaaagtggaggaccctctatcttctcattccttaactgagccaccgatgttaagaaaaaaatggcttaagcggtaccttcaacaactattctagttaagaaggtgacaacaaattgaggccgcgaattcggcgaaaactctttcctttggttgtgctaagaggtgatgcccaaggtgcaccacctttcaagaactggatcatgaacaactttatcctcctggaagaacagctcatcaagaaatcccaacaaaagagaagaacttctccctcgaactttaaagtccgcttctttgtgttaaccaaagccagcctggcatactttgaagatcgtcatgggaagaagcgcacgctgaaggggtccattgagctctcccgaatcaaatgtgttgagattgtgaaaagtgacatcagcatcccatgccactataaatacccgtttcaggtggtgcatgacaactacctcctatatgtgtttgctccagatcgtgagagccggcagcgctgggtgctggcccttaaagaagaaacgaggaataataacagtttggtgcctaaatatcatcctaatttctggatggatgggaagtggaggtgctgttctcagctggagaagcttgcaacaggctgtgcccaatatgatccaaccaagaatgcttcaaagaagcctcttcctcctactcctgaagacaacaggcgaccactttgggaacctgaagaaactgtggtcattgccttatatgactaccaaaccaatgatcctcaggaactcgcactgcggcgcaacgaagagtactgcctgctggacagttctgagattcactggtggagagtccaggacaggaatgggcatgaaggatatgtaccaagcagttatctggtggaaaaatctccaaataatctggaaacctatgagtggtacaataagagtatcagccgagacaaagctgaaaaacttcttttggacacaggcaaagaaggagccttcatggtaagggattccaggactgcaggaacatacaccgtgtctgttttcaccaaggctgttgtaagtgagaacaatccctgtataaagcattatcacatcaaggaaacaaatgacaatcctaagcgatactatgtggctgaaaagtatgtgttcgattccatccctcttctcatcaactatcaccaacataatggaggaggcctgtggactcgactccggtatccagtttgttttgggaggcagaaagccccagttacagcagggctgagatacgggaaatgggtgatcgacccctcagagctcacttttgtgcaagagattggcagtgggcaatttgggttggtgcatctgggctactggctcaacaaggacaaggtggctatcaaaaccattcgggaaggggctatgtcagaagaggacttcatagaggaggctgaagtaatgatgaaactctctcatcccaaactggtgcagctgtatggggtgtgcctggagcaggcccccatctgcctggtgtttgagttcatggagcacggctgcctgtcagattatctacgcacccagcggggactttttgctgcagagaccctgctgggcatgtgtctggatgtgtgtgagggcatggcctacctggaagaggcatgtgtcatccacagagacttggctgccagaaattgtttggtgggagaaaaccaagtcatcaaggtgtctgactttgggatgacaaggttcgttctggatgatcagtacaccagttccacaggcaccaaattcccggtgaagtgggcatccccagaggttttctctttcagtcgctatagcagcaagtccgatgtgtggtcatttggtgtgctgatgtgggaagttttcagtgaaggcaaaatcccgtatgaaaaccgaagcaactcagaggtggtggaagacatcagtaccggatttcggttgtacaagccccggctggcctccacacacgtctaccagattatgaatcactgctggaaagagagaccagaagatcggccagccttctccagactgctgcgtcaactggctgaaattgcagaatcaggactttagtagagactgagtaccaggccacgggctcagatcctgaatggaggaaggatatgtcctcattccatagagcattagaagctgccaccagcccaggaccctccagaggcagcctggcctgtactcagtccctgagtcaccatggaagcagcatcctgaccacagctggcagtcaagccacagctggagggtcagccaccaagctgggagctgagccagaacaggagtgatgtctctgcccttcctctagcctcttgtcacatgtggtgcacaaacctcaacctgacagctttcagacagcattcttgcacttcttagcaacagagagagacatgacgtaagacccagattgctatttttattgttatttttcaacagtgaatctaaagtttatggttccagggactttttatttgacccaacaacacagtatcccaggatatggaggcaaggggaacaagagcatgagtgtttttccaagaaactggtgagttaagtaagattagagtgagtgtgctctgttgctgtgatgctgtcagccacagcttcctgccgtagagaatgatagagcagctgctcacacaggaggccggatatctgataagcagctttatgaggttttacagagtatgctgctacctctctccttgaagggagcatggcagacccattggatggattggggtgaacagttcaggtcccatgcttggagcattgggtatctgatgtctgcaccagaacaagagaacctctgacggtggagaaccatgtggtgtaagaagagatcttaggtctcttctttataccaagctcatgttttataccaagctcatcttttataccaagctgtgcaggtgactatgcctcctcttctgcacagaatgcttccaccagcatcctgagaagaaatgattacttctgtaaaacatccttttttccagcctctgggaatcagcccccccctctctgcactatccgatcctcatcaacagagggcagcattgtgttggtcagtgttcccttggcgagcaattgaaacttgtttaggccctagggttgagcaattttaaggttgagactccaagtctcctaaaattctaggagagaaataaagagtctgtttttgctcaaaccatcaggatggaaacagtcaggcactgactggggtgcttccaagaggcatgagagtgcctactctggcttgagcacttctatatgcaaggtgaatatgtactgagctaggagacttccctgcaaaatctctgttcaccctgggttcacatccccatgaggtaatattattattcccattttacaaataatgtaactgaggctttaaaaagccaagacatctgcccaaagtgatggaactagaaagtctagagctggtattctagcccaaatctgtctgaccgcaatacacagattatttattcctattagacactggcttctactgaaaatgaaacttattgcagagggaataaatacaaagatggaaagccagtaaagaagtcagtatagaaccactagcgatagtgttgctctggcacagaccactgtggttgatgcatggccctccaacttggaataggattttccttttcctattctgtatccttaccttggtcatgttaatgactttggagttattcagttcctgaccctttaattctcacaaccaaccagtcatgttgcttgaagccattatagacgagcttcaaagcaactttaaaagattgttatgtagaagtatgagttcttcctttaattatcattccaactttcagctgtagtcttcttgaacacttatgaggagggaggacattccctgatataagagaggatggtgttgcaattggctctttctaaatcatgtgacgttttgactggcttgagattcagatgcataatttttaattattgtgaagtggagagcctcaagataaaactctgtcattacgaagatgattttactcagcttatccaaaattatctctgtttactttttagaattttgtacattatcttttgggatccttaattagagatgatttctggaacattcagtctagaaagaaaacattggaattgactgatctctgtggtttggtttagaaaattcccctgtgcatggtattacctttttcaagctcagattcatctaatcctcaactgtacatgtgtacattcttcacctcctggtgccctatcccgcaaaatgggcttcctgcctgggtttttctcttctcacattttttaaatggtcccctgtgtttgtagagaactcccttatacagagttttggttctagttttatttcgtagattttgcattttgtaccttttgagactatgtatttatatttggatcagatgcatatttattaatgtacagtcactgctagtgttcaaaataaaaatgttacaaatacctgttatcctttgtagagcacacagagttaaaagttgaatatagcaatattaaagctgcattttaa

SEQ ID NO: 6369 - protein, 620 aa, Homo sapien
MNNFILLEEQLIKKSQQKRRTSPSNFKVRFFVLTKASLAYFEDRHGKKRTLKGSIELSRIKCVEIVKSDISIPCHYKYPFQVVHDNYLLYVFAPDRESRQRWVLALKEETRNNNSLVPKYHPNFWMDGKWRCCSQLEKLATGCAQYDPTKNASKKPLPPTPEDNRRPLWEPEETVVIALYDYQTNDPQELALRRNEEYCLLDSSEIHWWRVQDRNGHEGYVPSSYLVEKSPNNLETYEWYNKSISRDKAEKLLLDTGKEGAFMVRDSRTAGTYTVSVFTKAVVSENNPCIKHYHIKETNDNPKRYYVAEKYVFDSIPLLINYHQHNGGGLWTRLRYPVCFGRQKAPVTAGLRYGKWVIDPSELTFVQEIGSGQFGLVHLGYWLNKDKVAIKTIREGAMSEEDFIEEAEVMMKLSHPKLVQLYGVCLEQAPICLVFEFMEHGCLSDYLRTQRGLFAAETLLGMCLDVCEGMAYLEEACVIHRDLAARNCLVGENQVIKVSDFGMTRFVLDDQYTSSTGTKFPVKWASPEVFSFSRYSSKSDVWSFGVLMWEVFSEGKIPYENRSNSEVVEDISTGFRLYKPRLASTHVYQIMNHCWKERPEDRPAFSRLLRQLAEIAESGL

SEQ ID NO: 6370 - DNA, 2061 bp, Homo sapien
tgttccgcgatcttctcaggctctcctagcagcatccatcgccgccaccctatcttcactggcttcaccttctccttctctcttcgttgctgagcgacaagcttcctagcgctatgactgtcgtctccgtcccgcagcgggagccgctcgtcctgggtggccgccttgcgccgcttggcttttcctcccgaggttactttggggccctcccgatggtgaccacggctccgcctcctttaccccggatcccggacccccgggcactgcccccgaccctcttcctccctcatttcctagggggagatggcccgtgtctgaccccccagcctcgcgctccagcagctctgcccaaccgcagcctcgccgtggcgggaggcactcctcgggcagcgccgaagaagcggcgaaagaagaaggtgcgggccagccccgcagggcagctgcccagccgcttccaccagtaccagcagcaccggccgagtctggagggcggccggagccccgcgaccggcccgagcggagcgcaggaggtcccgggcccggccgccgccttggccccgagtcctgcagccgcagccggcacggagggagccagccccgaccttgccccgctgcggcccgcggctcccggccaaacccccctcaggaaagaggttttaaaatcaaagatgggaaaatcggagaaaattgcccttccccatggccagcttgttcatggtatacacttgtatgagcaaccaaagataaacagacagaaaagcaaatataacttgccactaaccaagatcacctctgcaaaaagaaatgaaaacaacttttggcaggattctgtttcatctgacagaattcagaagcaggaaaaaaagccttttaaaaataccgagaacattaaaaattcgcatttgaagaaatcagcatttctaactgaagtgagccaaaaggaaaattatgctggggcaaagtttagtgatccaccttctcctagtgttcttccaaagcctcctagtcactggatgggaagcactgttgaaaattccaaccaaaacagggagctgatggcagtacacttaaaaaccctcctcaaagttcaaacttagatttcagatttcagtatgtgtgtaaaacataatttttcccatatccctggactcttgagaaaattggtacagaaatggaaatttgccttgttgcaacatacaattgcaaaagatgagtttaaaaaattacatacaaacagcttgtattatattttatattttgtaaatactgtataccatgtattatgtgtatattgttcatacttgagaggtatattatagttttgttatgaaagtatgtattttgccctgcccacattgcaggtgttttgtatatatacaatggataaattttaagtgtgtgctaaggcacatggaagaccgattttatttgcacaaggtactgagatttttttcaagaaacagctgtcaaatctcaaggtgaagatctaaatgtgaacagtttactaatgcactactgaagtttaaatctgtggcacaatcaatgtaagcatggggtttgtttctctaaattgatttgtaatctgaaattactgaacaactcctattcccatttttgctaaactcaatttctggttttggtatatatccattccagcttaatgcctctaattttaatgccaacaaaattggttgtaatcaaattttaaaataataataatttggcccccccttttaaaatagtcttgactctttgtgtgtgactgtttctcatgtttgaatgtgtgactaggagatgattttgtgtggttggatttttttgacttctactttactggctgagtgtgagccgccatgcctggccataatctacattttcttaccaggagcagcattgaggtttttgagcatagtacttgactactctagaggctgagacgggagcatctcttgagcctgagaagtggagattgcaattgagctaggatcaggccactgcactccagcctgggtaacagacgctgtctcaaaaaaaaggccaagagaaagtaagggagacaga

SEQ ID NO: 6371 - protein, 327 aa, Homo sapien
MTVVSVPQREPLVLGGRLAPLGFSSRGYFGALPMVTTAPPPLPRIPDPRALPPTLFLPHFLGGDGPCLTPQPRAPAALPNRSLAVAGGTPRAAPKKRRKKKVRASPAGQLPSRFHQYQQHRPSLEGGRSPATGPSGAQEVPGPAAALAPSPAAAAGTEGASPDLAPLRPAAPGQTPLRKEVLKSKMGKSEKIALPHGQLVHGIHLYEQPKINRQKSKYNLPLTKITSAKRNENNFWQDSVSSDRIQKQEKKPFKNTENIKNSHLKKSAFLTEVSQKENYAGAKFSDPPSPSVLPKPPSHWMGSTVENSNQNRELMAVHLKTLLKVQT

SEQ ID NO: 6372 - DNA, 1121 bp, Homo sapien; identical to SEQ ID NO: 1641

SEQ ID NO: 6373 - protein, 161 aa, Homo sapien; identical to SEQ ID NO: 1642

SEQ ID NO: 6374 - DNA, 600 bp, Homo sapien; identical to SEQ ID NO: 3325

SEQ ID NO: 6375 - protein, 130 aa, Homo sapien; identical to SEQ ID NO: 3326

SEQ ID NO: 6376 - DNA, 2225 bp, Homo sapien; identical to SEQ ID NO: 313

SEQ ID NO: 6377 - protein, 704 aa, Homo sapien; identical to SEQ ID NO: 314

SEQ ID NO: 6378 - DNA, 4221 bp, Homo sapien; identical to SEQ ID NO: 607

SEQ ID NO: 6379 - protein, 343 aa, Homo sapien; identical to SEQ ID NO: 608

SEQ ID NO: 6380 - DNA, 1237 bp, Homo sapien
catctgtcactggccaccggtttccgggagtaagcggcagctaccttacagccctgacacgagccgggtgctctctcttctcaccgcggcccacgtctcctcgctggctccggtggcctcgctgggtcgcgaggaggcggaggactgtactctgaggccaaaagccagagtcggccctgaacgcccacgactctcagggtccagaggccgtgagaccggccgcggctgaaaggtaaagaaaccaagtggaagagtgtttcctcctctggccgtaaagcagctgtccccgccctactccggaccgccccaaagactccatgggatggacctgagtcagccgaatcctagccccttcccttgggcctgctgtggtgctcgacatcagtgacagacggaagcagcagaccatcaaggctacgggaggcccggggcgcttgcgaagatgaagtttggctgcctctccttccggcagccttatgctggctttgtcttaaatggaatcaagactgtggagacgcgctggcgtcctctgctgagcagccagcggaactgtaccatcgccgtccacattgctcacagggactgggaaggcgatgcctgtcgggagctgctggtggagagactcgggatgactcctgctcagattcaggccttgctcaggaaaggggaaaagtttggtcgaggagtgatagcgggactcgttgacattggggaaactttgcaatgccccgaagacttaactcccgatgaggttgtggaactagaaaatcaagctgcactgaccaacctgaagcagaagtacctgactgtgatttcaaaccccaggtggttactggagcccatacctaggaaaggaggcaaggatgtattccaggtagacatcccagagcacctgatccctttggggcatgaagtgtgacaagtgtgggctcctgaaaggaatgttccagagaaaccagctaaatcatggcaccttcaatttgccatcgtgacgcagacctgtataaattaggttaaagatgaatttccactgctttggagagtcccacccactaagcactgtgcatgtaaacaggttcctttgctcagatgaaggaagtagggggtggggctttccttgtgtgatgcctccttaggcacacaggcaatgtctcaagtactttgaccttagggtagaaggcaaagctgccagtaaatgtctcagcattgctgctaattttggtcctgctagtttctg

SEQ ID NO: 6381 - DNA, 2827 bp, Homo sapien
cgcctacacaatgaaattgtctacgccgtggaaaaactctccaaggaaaacaacagctattccgtggatgccgccgaggtcactgaactgcatgtcatcagttatgaagtggagcgggacctgactccactgattctctccaactgccagtaccaggtggaggagggcagagagaccgtgcaggagttcgatctggagaagattcagcggcagatcgtcagccgcttcctccagggcaagccccggctgagcctcaagggaatacccactctggtgtacagacacgactggaactatgaacatctctttatggacatcaagaacaaaatggcacaggactccctccccagctcggtcattagtgccatcagtggacagctgcagtcctacagcgatgcctgtgaagtgctgtctgtcgtagaagtcactctggggtttctgagcacagctggtggggatccaaacatgcagctgaatgtgtatactcaagacatcctgcaaatgggtgatcagacgattcacgtgttaaaggccttaaacagatgccagttaaaacacaccattgccctctggcagttcctgtctgctcataagtctgaacagctgctgcggctgcacaaagagccatttggggaaatcagttcaaggtacaaagcggatctgagcccggaaaatgctaagctcctcagcacattcctaaatcagactggcctagacgccttcctgctagagctgcacgaaatgataatcttgaaactaaagaacccccaaacccaaaccgaggagcgcttccgccctcagtggagcctgagagacactctcgtaagttacatgcaaactaaagaaagtgaaattcttcctgaaatggcatctcagttcccagaagagatactgcccgccagctgtgtctcagtgtggaaaacagctgctgtgctgaaatggaatcgagaaatgagatagaattatttcctcagctatctttggatgactttggagagaagactcctctctcctcgtctgcggcgtggacttgatcatggactggtgcctttgcattcagaaggagagctgtcagcgtagcaccgaattcaagaccaaggcgtgctacctgagctgacagctttttgaaagccgagctgtttctgaaccatgtacatacatgttctgaaactttctcatcattttatgagtactgttcattgagagatgacaatgaagattagatgaaattggaaataaaccaacattgtttacattccaggagacttgtagctcagccacacacgcagtaatgacctgtgcccgttcgcctctggcactgcccacccctctttttttttttcttctaattctgtactcacaaaagagaatctcattttcttctttcttccattcccttaaattctgagtactgtacatatatttctgggttcccacgatgatgtgaaaaactaccagactgttttttgtcttctcacaaagacaagaaaaatcagggcattttgtgagtgccttaagatcaaactaacaagatctgaccctctcccctcacagtgagccactgccccacttcagagggtaagagccaaaagcctcattgtgaaaggcactggacttggaccagggacaccatcagggccttggttttctcacgcataaaatggagagtggattaatcgccaaagattcttctgatctgacattttgaaattgtgagagaaactagatgactgtaaacttggtcacaggcctggttctggcagttctttgcggacttttttctagcattatgccaaataaacatgcagtctcagtgtgctctcgcatgtatgaatatctagtcctttctgtggttctcagccaagacataaaaactaggactcagagcacatacaaaaccagttatgtttcggaaagagggaaaagagtccccgagcccggatcttgtgctgcttttctcactgacgtgttgccttttttctttacaaaatctgctttgatacttaggacctctctggactaatttctcttcctagacagctcagcacagctattgatatgttagaggcagtatccttaatattcattctaaatgagttaacgacttaacttgaaattgggcctaaggagtgagaactacaaaaatacaaaatgcttgtccaggactcagccatgcacaccttgagcagcgccggcaggaggcacggaaggaactgtgctccgttctcctcactgtcatggtgccaccagtgtctgatgaagggcagagtgacccagactgcaggcagtaactgacttcacacagtccctggcatttagtcatctgtgattgttttatcactctggactgtgcagagccacctgccaccgagatctgcattccgactgcctatgaacgggtgtgggggccgggggctggcttgctgaagtcttcaacttgcactcggagctcctttgatacctcagagctggctgtcaggtggcagctcacacccagactcactggccacacctcagcagggggggagtcgagtgtcagtctctttctgtgaaggctttttttttcctttggcctgggaatttttcccatttttatgaaggggttttaaattgtttcattttgtgtgctgtgcttcaaagccttaactgtcaaatcttgcattatcttgtttgtacagaaatatactggcctagcagaggcaaaaaaaaaaaaaatgaattttattttacttgtcacacctgtcttaataaactggagttttgctgctaaaaaaaaaaaaaaaaaaaaaaaaaaaaaaaaaaaaaaaaaaaaaaaaaaaaaaaaaaa

SEQ ID NO: 6382 - protein, 216 aa, Homo sapien [sequence omitted]

SEQ ID NO: 6383 - DNA, 1519 bp, Homo sapien
ggcacgaggaagtggagggggtgaaagtgagggaggagaatggacagaatactgactggaacgttaattcgagcatttcatatgcgaagagcggaataacagttccgtattcttctttcagtttctccattagattagcttcattttcgaatgctccgttttgcatgcttaattttgaaactagcccgtggtttggcagaatttgactgaattcaggggtgagagtttgatccagtccaagtgtatttgaatttgagcacgcagttcaaccagtgtttacaatggaatttctgaagacttgtgtacttagaagaaatgcatgcactgcggtttgcttctggagaagcaaagttgtccaaaagccttcagttagaaggattagtactacctctcctaggagcactgtcatgcctgcttgggtgatagataaatatgggaagaatgaagtgcttcgattcactcagaacatgatgatgcctatcatacactatccaaatgaagtcattgtcaaagttcacgctgccagtgtaaatcctatagacgttaatatgagaagtggttatggagctacagctttaaatatgaagcgtgatcctttacacgtgaaaatcaaaggagaagaatttcctctgactctgggtcgggatgtctctggcgtggtgatggaatgtgggcttgatgtgaaatacttcaagcctggagatgaggtctgggctgcagttcctccttggaaacaaggcactctttcagagtttgttgtagtcagtgggaatgaggtctctcacaaacccaaatcactcactcatactcaagctgcctctttgccatatgtggctctcacagcctggtctgctataaacaaagttggtggcctgaatgacaagaattgcacaggaaaacgtgttctaatcttaggcgcttcaggcggagttggtacttttgctatacaggtaatgaaagcatgggatgctcatgtgacagcagtttgctcccaagatgccagtgaacttgtaaggaagcttggtgcagacgatgtaattgattacaaatctggaagtgtggaagagcagttgaaatccttaaaaccatttgattttatccttgataatgttggcggatccactgaaacatgggctccagattttctcaagaaatggtcaggagccacctatgtgactttggtgactcctttcctcctgaacatggaccgattgggcatagcagatggcatgttgcagacaggagtcactgtaggttcaaaggcattaaagcatttctggaaaggagtccattatcgctgggcatttttcatggccagtggcccatgtttagatgacattgcagaactggtggatgcgggaaagatccggccagttattgaacaaacctttcctttttctaaagttccagaagccttcctgaaggtggaaagaggacacgcacgaggaaagactgtaattaatgttgtttaaataaaaatgcagtttagtgaaaaaaaaaaaaaaaaaaaaaaaaaaaa

SEQ ID NO: 6384 - protein, 354 aa, Homo sapien
MPAWVIDKYGKNEVLRFTQNMMMPIIHYPNEVIVKVHAASVNPIDVNMRSGYGATALNMKRDPLHVKIKGEEFPLTLGRDVSGVVMECGLDVKYFKPGDEVWAAVPPWKQGTLSEFVVVSGNEVSHKPKSLTHTQAASLPYVALTAWSAINKVGGLNDKNCTGKRVLILGASGGVGTFAIQVMKAWDAHVTAVCSQDASELVRKLGADDVIDYKSGSVEEQLKSLKPFDFILDNVGGSTETWAPDFLKKWSGATYVTLVTPFLLNMDRLGIADGMLQTGVTVGSKALKHFWKGVHYRWAFFMASGPCLDDIAELVDAGKIRPVIEQTFPFSKVPEAFLKVERGHARGKTVINVV

SEQ ID NO: 6385 - DNA, 1444 bp, Homo sapien; identical to SEQ ID NO: 3483

SEQ ID NO: 6386 - protein, 370 aa, Homo sapien; identical to SEQ ID NO: 3484

SEQ ID NO: 6387 - DNA, 2125 bp, Homo sapien; identical to SEQ ID NO: 3539

SEQ ID NO: 6388 - protein, 462 aa, Homo sapien; identical to SEQ ID NO: 3540

SEQ ID NO: 6389 - DNA, 1218 bp, Homo sapien
acacaacttcagctgaggaacttggcacggccagcttgggacccaggaccctaacgcagaggcgctgtgtttggaagtcccgctatcacggccccccagatggggcctggacgatgcctcctgacggccttgttgcttctggccctggcgccaccgccggaagcctcccagtactgcggccgccttgaatactggaacccagacaacaagtgctgcagcagctgcctgcaacgcttcgggccgcccccctgcccggactatgagttccgggaaaactgcggactcaatgaccacggcgatttcgtaacgcccccgttccgaaagtgttcttctgggcagtgcaaccccgacggcgcggagctatgtagcccctgcggcggcggagccgtgacccctactcccgccgcgggcgggggcagaaccccgtggcgctgcagagagaggccggtccctgccaaggggcactgccccctcacacctggaaacccaggcgcccctagctcccaggagcgcagctcaccagcaagttccattgcctggaggacccctgagcctgtccctcagcaggcctggccgaatttccttccgctcgtggtgctggtcctgctcctgaccttggcggtgatagcgatcctcctgtttattctgctctggcatctctgctggcccaaggagaaagccgacccctatccctatcctggcttggtctgcggagtccccaacacccacaccccttcctcctcgcatctgtcctccccaggcgccctggagacaggggacacatggaaggaggcctcactacttccactcctgagcagggaactgtccagtctggcgtcacaacccctgtctcgcctcctggatgagctggaggtgctggaagagctgattgtactgctggaccctgagcctgggccaggtgggggtatggcccatggcactactcgacacctggccgcaagatatgggctgcctgctgcctggtccacctttgcctattcgctgaggccgagtcgctcgccgctgcgggctctgattgagatggtggtggcaagggagccctctgcctccctgggccagcttggcacacacctcgcccagctagggcgggcagatgcattgcgggtgctgtccaagcttggctcatctggggtttgctgggcttaacacccaataaagaactttgctgactactaaaaaaaaaaaaaaaaaaaaaaa

SEQ ID NO: 6390 - protein, 355 aa, Homo sapien
MGPGRCLLTALLLLALAPPPEASQYCGRLEYWNPDNKCCSSCLQRFGPPPCPDYEFRENCGLNDHGDFVTPPFRKCSSGQCNPDGAELCSPCGGGAVTPTPAAGGGRTPWRCRERPVPAKGHCPLTPGNPGAPSSQERSSPASSIAWRTPEPVPQQAWPNFLPLVVLVLLLTLAVIAILLFILLWHLCWPKEKADPYPYPGLVCGVPNTHTPSSSHLSSPGALETGDTWKEASLLPLLSRELSSLASQPLSRLLDELEVLEELIVLLDPEPGPGGGMAHGTTRHLAARYGLPAAWSTFAYSLRPSRSPLRALIEMVVAREPSASLGQLGTHLAQLGRADALRVLSKLGSSGVCWA

SEQ ID NO: 6391 - DNA, 1005 bp, Homo sapien
gtccaacatggcggcgcccagcggagggtggaacggcgtcggcgcgagcttgtgggccgcgctgctcctaggggccgtggcgctgaggccggcggaggcggtgtccgagcccacgacggtggcgtttgacgtgcggcccggcggcgtcgtgcattccttctcccataacgtgggcccgggggacaaatatacgtgtatgttcacttacgcctctcaaggagggaccaatgagcaatggcagatgagtctggggaccagcgaagaccaccagcacttcacctgcaccatctggaggccccaggggaagtcctatctgtacttcacacagttcaaggcagaggtgcggggcgctgagattgagtacgccatggcctactctaaagccgcatttgaaagggaaagtgatgtccctctgaaaactgaggaatttgaagtgaccaaaacagcagtggctcacaggcccggggcattcaaagctgagctgtccaagctggtgattgtggccaaggcatcgcgcactgagctgtgaccagcagccctgttgcgggtggcaccttctcatctccggtgaagctgaaggggcctgtgtccctgaaagggccagcacatcactggttttctaggagggactcttaagttttctacctgggctgacgttgccttgtccggaggggcttgcagggtggctgaagccctggggcagagaacagagggtccagggccctcctggctcccaacagcttctcagttcccacttcctgctgagctcttctggactcaggatcgcagatccggggcacaaagagggtggggaacatgggggctatgctggggaaagcagccatgctccccccgacctccagccgagcatccttcatgagcctgcagaactgctttcctatgtttacccaggggacctcctttcagatgaactgggaagagatgaaatgttttttcatatttaaataaataagaacattaaaaagcaaaaaaaaaaaaaaaaaa

SEQ ID NO: 6392 - protein, 173 aa, Homo sapien
MAAPSGGWNGVGASLWAALLLGAVALRPAEAVSEPTTVAFDVRPGGVVHSFSHNVGPGDKYTCMFTYASQGGTNEQWQMSLGTSEDHQHFTCTIWRPQGKSYLYFTQFKAEVRGAEIEYAMAYSKAAFERESDVPLKTEEFEVTKTAVAHRPGAFKAELSKLVIVAKASRTEL

SEQ ID NO: 6393 - DNA, 1842 bp, Homo sapien; identical to SEQ ID NO: 3509

SEQ ID NO: 6394 - protein, 257 aa, Homo sapien; identical to SEQ ID NO: 3510

SEQ ID NO: 6395 - DNA, 2349 bp, Homo sapien; identical to SEQ ID NO: 3481

SEQ ID NO: 6396 - protein, 308 aa, Homo sapien; identical to SEQ ID NO: 3482

SEQ ID NO: 6397 - DNA, 2415 bp, Homo sapien
acatgctctgtgaggagatttccctcgatgatgtgcttctgagtgctctgctgaggaacgatgggaagtctgcccagcagaagaaaatctctgccaagcccaagcttgagttcctctgtccaaggccagggacctgtgaccatggaagcagagagaagcaaggccacagccgtggccctgggcagtttcccggcaggtggcccggccgagctgtcgctgagactcggggagccattgaccatcgtctctgaggatggagactggtggacggtgctgtctgaagtctcaggcagagagtataacatccccagcgtccacgtggccaaagtctcccatgggtggctgtatgagggcctgagcagggagaaagcagaggaactgctgttgttacctgggaaccctggaggggccttcctcatccgggagagccagaccaggagaggctcttactctctgtcagtccgcctcagccgccctgcatcctgggaccggatcagacactacaggatccactgccttgacaatggctggctgtacatctcaccgcgcctcaccttcccctcactccaggccctggtggaccattactctgagctggcggatgacatctgctgcctactcaaggagccctgtgtcctgcagagggctggcccgctccctggcaaggatatacccctacctgtgactgtgcagaggacaccactcaactggaaagagctggacagctccctcctgttttctgaagctgccacaggggaggagtctcttctcagtgagggtctccgggagtccctcagcttctacatcagcctgaatgacgaggctgtctctttggatgatgcctaggcccaaaggagaggccaaaagggaaaccaaggctgcacacctagaaccccaattcagcctcctgggcaccccagaggcaaggctgtgcactcagggagggagggtgggacacagaggtgcatctagggtcccacctgtacccttgctctttcctctcttagcccttagaagtcacctacttccttccagtgccatgatcccacctgcgacctctagtgcgagtgcagagaaggtgggaccagggccagggttccaaaaagagaataagcctcctggggggtctgacctagttagttcttgagtttggggtttccagtaccatctggatgccctgcctgttgagccccattctacatccccaccattaaccaggccccacccacaaggtagaaacaacccctagagtcaacgagaaagtcattttcagaaaatctacaagtctcgttgagaccaccaccatacctcagaaggtaggactgtggcctagaagggaaaggaaagctgagatggtgtcttaccgtagcagcagatcttggatggtccaggctctatgtgacctccagagcaaagagaaagactcgggacagtctaggtcctcaaatgtcccccattgaggacaacagccccagctctttttcttttttttgagacggagtcttgccctgttgcccatgctggagtgcaatggcacgatctcagctcactgcaacctccatctcctggattcaaacaattctcctgcctcagcctccagaatagctgggattacaggcgtacaccaccatgcctggctaatttttttgtatttttagtagacatggggtttcaccacattggccaggctggtgtcgaactcctgacctcaggtgatccacccaccttggcctcccaaagtgctgggattacaggtgtgagccacggcacccagcctagctctcagatctctatttcattttgtggcttaccattccctagcacactggccttgccatcttgtggccgaataaaaaataacacctcttaagtctagcacactgcagtgaggccaggcacctcagtgctgggcaggggcatcagaaggtgctaagccctctctccacaatgccaagacggagaccacagcctacaccaaatccagcccttgatttccctgctgcctccataaacagaaagaggtctgctggatccgctaagggatcagggagaggaagaaagagggatggggtgggaggcaccccctccagtgctcctactggttcccaagctacaggtggggtgggaaaggctttatcaggtatcatcaacaggttctcaattaaagatttgatttattcaagtatgtgaaaacattctacaatggaaactcttattagatgctgcatgtactgtgctatggaccacgcacatacagccatgctgtttcagaagacttgaaatgccattgatagtttaaaaactctacacccgatggagaatcgaggaagacgatttaatgtttcatctgaatccagaggtgcatcaaattaaatgacagctccacttggcaaaaaaaaaaaaaaaaaaaaaaaa

SEQ ID NO: 6398 - protein, 261 aa, Homo sapien
MGSLPSRRKSLPSPSLSSSVQGQGPVTMEAERSKATAVALGSFPAGGPAELSLRLGEPLTIVSEDGDWWTVLSEVSGREYNIPSVHVAKVSHGWLYEGLSREKAEELLLLPGNPGGAFLIRESQTRRGSYSLSVRLSRPASWDRIRHYRIHCLDNGWLYISPRLTFPSLQALVDHYSELADDICCLLKEPCVLQRAGPLPGKDIPLPVTVQRTPLNWKELDSSLLFSEAATGEESLLSEGLRESLSFYISLNDEAVSLDDA

SEQ ID NO: 6399 - DNA, 794 bp, Homo sapien; identical to SEQ ID NO: 3887

SEQ ID NO: 6400 - protein, 192 aa, Homo sapien; identical to SEQ ID NO: 3888

SEQ ID NO: 6401 - DNA, 4644 bp, Homo sapien; identical to SEQ ID NO: 4867

SEQ ID NO: 6402 - DNA, 3243 bp, Homo sapien; identical to SEQ ID NO: 3867

SEQ ID NO: 6403 - protein, 854 aa, Homo sapien; identical to SEQ ID NO: 3868

SEQ ID NO: 6404 - DNA, 2444 bp, Homo sapien; identical to SEQ ID NO: 3537

SEQ ID NO: 6405 - protein, 592 aa, Homo sapien; identical to SEQ ID NO: 3538

SEQ ID NO: 6406 - DNA, 1683 bp, Homo sapien; identical to SEQ ID NO: 4122

SEQ ID NO: 6407 - protein, 99 aa, Homo sapien; identical to SEQ ID NO: 4123

SEQ ID NO: 6408 - DNA, 1743 bp, Homo sapien
ccacgcgtccggctacctgtgcatcgtgctgctcatgctgctgctgctcatcttctggatcgcgccggcccatgggcccaccaacatcatggtctacatcagcatctgctccttgctgggcagtttcaccgtgccttccaccaagggcatcgggctggcggcccaagacatcttgcataacaacccgtccagtcagagagccctctgcctgtgcctggtactcctggccgtgctcggctgcagcatcatcgtccagttcaggtacatcaacaaggcgctggagtgcttcgactcctcggtgttcggggccatctactacgtcgtgtttaccacgctggtcctgctggcctcagccatcctcttccgggagtggagcaacgtgggcctggtggacttcttggggatggcctgtggattcacgaccgtctccgtggggattgtccttatacaggtgttcaaagagttcaatttcaaccttggggagatgaacaaatctaatatgaaaacagactagattgcaataggagcttggatggttcgaggaataggcattggaggtggtttctggccgtgattggatgtgaagtagaagaggtcctcgatcatggtgttagaattgactggatagtaacaggtggtctggtggatagcggggagcatggctcagcaccagagcagaggcccagcagcctctgcagcccaaacgtcccaacggtgcctggaccatctcttctgatgagacgaatctcattttcatttccattaacctggaagctttcatgaatatttcttctttaaaacattttaacattatttaaacagaaaaagatgggctctttctgggtaggtggtacatgatagcagagatatttttacttagattactttgggaatgagagattgtgtcttgaactctgcactgtacaggatgtgtctgtagttgtgttagtttgcattaagcatgtatacattcaagtatgtcatccaaataagaggcatatcattgaattgtttttaatcctctgacaagttgactcttcgacccccacccccacccaagacattttaatagtaaatagagagagagagaagagttaatgaacatgaggtagtgttccactggcaggatgacttttcaatagctcaaatcaatttcagtgcctttatcacttgaattattaacttaatttgactcttaatgtgtatatgttcttagattagaataatgcaacttcgagtatgctttaatatttcaatattcaagttacaaatgtataaggcagttagaaataatacagtcacatgtcacttaatgatagggaaacattctgagaaatgcattgtaaggtgactttattgcgtgaacatcatggagtgcacttatacaaacctagatgggacacctatgacccacccaggccagatggtacagcctgttgctcctgggccacacacctgtacagcatgtgactgcactgaataccgcaggcaattgtaacacagtggtgagtatttgtgtttacaaacataggaaaggtacagtaaaactatggtattacaatgttatgggaccaccgtcatgtaagtggtatgtctttgacagaaacatggttacgtggttcatgactgtatattcactggaagatagtcaagactaaagacacattagagcaaattgacccctttaacatgtgattattgtccaattaaagacagttgatttaagtagcaaaaaaaaaaaaa

SEQ ID NO: 6409 - protein, 159 aa, Homo sapien
MLLLLIFWIAPAHGPTNIMVYISICSLLGSFTVPSTKGIGLAAQDILHNNPSSQRALCLCLVLLAVLGCSIIVQFRYINKALECFDSSVFGAIYYVVFTTLVLLASAILFREWSNVGLVDFLGMACGFTTVSVGIVLIQVFKEFNFNLGEMNKSNMKTD

SEQ ID NO: 6410 - DNA, 3537 bp, Homo sapien
cgttatttgcagtggctttggggactcagcagtggcaagtccctgtgcataatgtgaacctgcagacttcaagatggggcccctcctgcacccactaacatgtctgcccttttttgtttttatcctggaacaagtggagaaatggcagagctggctgactctggggacccttccctttttcccatggcttcatttcttcctcaccacaactaattcggggagctgagaagtcacacagggtattcctctcccttctctgatgttattaattaatagaccagagaataaggttgcagatattacatttgttgtgtttttgtgttttgtttttttttttaaggaaaatcccaaacaaagcccagcatgatttgagaaaagaggatgttttcccagggaaaataatttttttaacctgcctgagaatgatttatttatttgttggaggccattggtcagacagcctggagcttgggctgtggaagatttcaaaagcatagggctgtggtctctggaaacctattacagcctgcagctgtgagctgagccagtgacgaggtccctggaaactcaggaaggctgacaggtgggccttggggtattggtttgtggagaaggaagcattctttaggctgcggcactccttatagtttcccacccaccgagtgacattcaggcagaaattgagctcaggagacagccagccttcccacatcccacttcacttcccggtccacacgtaaagcagtgtgtctccaaggaggcagtgagcaattcccaaggtccccgtgttgtgagaagcgcgctgctttctccctttgcagggaaaaaaaaaggctttcctggtgagatcatgagtccttccggcttcatttctcattgtgggtttaacttctaaaacgcaaatggagtttagagaggatgagcagaaccacaggacctgcccccatctctcactcactgcaattgcttctactctgggcacaagtagggtgtctgaagaccatgtttccctctggttctctagtttgcagataacacagaagacactggctagaaccttaagctttctgccaaaaagatgcagagagcagggcagtagctactggcagtggggtgtgaataaagagtcctttcacaaccaagttcactgaggatttggagcaccagcttcccagcagtatcgaggggtggagaggtgtacattcaggtggaggggtacatctaggggtggagaggtgtacattctagaaacagctgttaacacactccactttaaagacagcaagctagacctgcaggatcaaagccacacactgtggtaggggttacaaatgtttatggggcccagaatactagcatagatgcgtgaaatggttggtgtgaggcaaaagggcatggtgggggcaaggatggggactgtggtcttactggcatgcacgtgacctacccagaatgagcagctgctactcagccccaacctgtcattgtttgtaaaaatgtaagcacagtgtagtggaatcttccaatttggaagggaagccggaaatccagatttaatggaaaaaatctgatttttcaacgtcgggttttttgtttgtttgtttttgttttttttaacagatagtgggcaaagaaaaattccactgttccacgtgtacactgccagcaacctctgctctctggagaggtggtttaaagtgagattatgcattgccctggtagaagaggaaaaaagccagcatcaggtcagggcaaaaataacagcccatgttgaactcggaatggggacctcttgctaagtcattccactcctcaagagaccattccacagaggggggatggatcattcagctctcctggtcccaagattgtgctgaagggaagaaggaatagaatctggagatctggactgctgccccttagatatgcagaggtccacatctgcctggggctacagcttgtgggactccatcaaaccaggccgaaatggcaaagacagtctaggaggaggaggaggtagggtgtgaaacagccaggctctctccaaatcccaagtgttgacacagccatcttgtcccatccctggaagcctctttggaaaccacatagagctgtgctggctcacgggatgtcctgtttgcttctgcctcagttaccttactttgcccatgggtctaccacaggcgctacctcattgtgtctgctgagaagtttacctgggaggggggaacaaagttgtccaaatctgcttgagctgaatgtatgatctatgcaaattctctctctcctctctctcttcctctctggctctcttagaagtttttttgttttgttttgttttgttttgtgtttaccttgcaaacaagatactgtataggaccctcttaagatggaggagggctttcttgcgccacctgtgtctacccctcacgttgtctttggctctggtcttaccaggcgtatgcagggagaaagtgacctctcttccctctccacttggctgggaatattccaactgcctctgcctacagataccaccagaaagcgggttctgcaccttgtcatccccctccctaacgtcatctactccatccctcatgttcctccaacttgcttctcccatccctccttcaaaaacaaaacaaaacaaaacaaaagccttaggtttctcctttttgaaatgtggccttaacattatttttgggaagctgaccatccatcctttccctcccatctccaccaacatcagagaagacagcatcgtgaagcttctgtggcagcctcctaaggaaggggctgccaatctgtagttggcagatgctataggaattgcttacaaatgtcgtctttaagaaaaatgttcttatatttttcctatgggcaaaatgaaggcttgggtgctcatctaaagctcagccaactcctgaagcactctctcagagcatactgctgctgtaatgggctggcttaattatcggcagagtgcttgaaaaggctttgcagacctcccctgcccccaagactgggtgactttatatgtacttcattcaagggtaaatcaggagacgttctccatttatctcttcgtccttcctgcctggaaagtgatagcactaaatattcccagcagatgggtagtgttctcaaaggaatcaccctttccctaccttcagactctattctttacccttccattgctccagtgctgatggaggccaaagacaaccccagggttttcataggaaattcactggaattgtgcgcaattgtctttgtagtccttttgccttttttttttttaaatattatgttgtcaatagcatttgtttgggtatttgttttagaggcctcactctaagttattaccgtccccttcattgttttcaaagacatgtggtgatatagtttttaaaaataactattttgttatagatcataatatgcataaaactgtacagaaatattttgtaatgtgttgattttaaaaaaagaatctgtaaataaagttttaaaaaaagaaaaaaaaaaaaaaaaagg

SEQ ID NO: 6411 - protein, 183 aa, Homo sapien
MYDLCKFSLSSLSSSLALLEVFLFCFVLFCVYLANKILYRTLLRWRRAFLRHLCLPLTLSLALVLPGVCREKVTSLPSPLGWEYSNCLCLQIPPESGFCTLSSPSLTSSTPSLMFLQLASPIPPSKTKQNKTKALGFSFLKCGLNIIFGKLTIHPFPPISTNIREDSIVKLLWQPPKEGAANL

SEQ ID NO: 6412 - DNA, 581 bp, Homo sapien
ccgagaggtggttacattcgttgaaggacaccagctgcggaatttgcggctttggcagacccagctgagtcactgtcactgcctaccaatctcgaccggacctcgaccggctcgtctgtgctgccaatcgactcggcgtggcgtcggtcgtggtagataggcggtcatgcatacgaattttcagctcttgttctggtgaccttttgaatacgtcttgtctataaaagaaattcatgcctttgtaaaatacacagattgaaatcatggcaggtccagaaagtgatgcgcaataccagttcactggtattaaaaaatatttcaactcttatactctcacaggtagaatgaactgtgtactggccacatatggaagcattgcattgattgtcttatatttcaagttaaggtccaaaaaaactccagctgtgaaagcaacataaatggattttaaactgtctacggttcttaacctcatctgttaagttcccatgcctggagaagctaatgccaactcatcatgtgataattcaatttgtacaataaattatgaacccaaaaaaaaaaaaaaaaaaaaaaaaaaa

SEQ ID NO: 6413 - protein, 58 aa, Homo sapien
MAGPESDAQYQFTGIKKYFNSYTLTGRMNCVLATYGSIALIVLYFKLRSKKTPAVKAT

SEQ ID NO: 6414 - DNA, 3200 bp, Homo sapien
caggaagggccatgaagattaataaagatttggactcagggcaaatatttacttagtagcaataactcaaagaattactgttgaataaataagccaattaagcagccaatcacgtactatgcggatgcacacaaatgaaaccctcacttcaacctgaagacattcgcacatgagttacgtagagggacctgcaggaagcggtagagaaaacataaggcttatgcgtttaatttccacaccaatttcaggatctttgtcactgacagcagcactaagacttgttaactttatatagttaagaagaacaaggctgagcgcgatgactcacgcctgtaagcctagaactttgggaggccaaagcaggcagactgcttgagcccaggagttccagaccagcctgggcaacatggcaacaccccatctctacaaaaaaatacaagaatcagctgggcgtggtgatgtgttcctgtaatctcagctactcgggaggcagaggcaggaggattgcttgaacccgggaggcagaggttgtagttagccgagatctcgccactgcactccagtctggacgacagagtgagactcagtctcaaataaataaataaatacataaatataaggaaaaaaataaagctgctttctcctcttcctcctctttggtctcatctggctctgctccaggcatctgccacaatgtgggtgcttacacctgctgcttttgctgggaagttcttgagtgtgttcaggcaacctctgagctctctgtggaggagcctggtcccgctgttctgctggctgagggcaaccttctggctgctagctaccaagaggagaaagcagcagctggtcctgagagggccagatgagaccaaagaggaggaagaggaccctcctctgcccaccaccccaaccagcgtcaactatcacttcactcgccagtgcaactacaaatgcggcttctgtttccacacagccaaaacatcctttgtgctgccccttgaggaagcaaagagaggattgcttttgcttaaggaagctggtatggagaagatcaacttttcaggtggagagccatttcttcaagaccggggagaatacctgggcaagttggtgaggttctgcaaagtagagttgcggctgcccagcgtgagcatcgtgagcaatggaagcctgatccgggagaggtggttccagaattatggtgagtatttggacattctcgctatctcctgtgacagctttgacgaggaagtcaatgtccttattggccgtggccaaggaaagaagaaccatgtggaaaaccttcaaaagctgaggaggtggtgtagggattatagaatccctttcaagataaattctgtcattaatcgtttcaacgtggaagaggacatgacggaacagatcaaagcactaaaccctgtccgctggaaagtgttccagtgcctcttaattgaaggtgagaattgtggagaagatgctctaagagaagcagaaagatttgttattggtgatgaagaatttgaaagattcttggagcgccacaaagaagtgtcctgcttggtgcctgaatctaaccagaagatgaaagactcctaccttattctggatgaatatatgcgctttctgaactgtagaaagggacggaaggacccttccaagtccatcctggatgttggtgtagaagaagctataaaattcagtggatttgatgaaaagatgtttctgaagcgaggaggaaaatacatatggagtaaggctgatctgaagctggattggtagagcggaaagtggaacgagacttcaacacaccagtgggaaaactcctagagtaactgccattgtctgcaatactatcccgttggtatttcccagtggctgaaaacctgattttctgctgcacgtggcatctgattacctgtggtcactgaacacacgaataacttggatagcaaatcctgagacaatggaaaaccattaactttacttcattggcttataaccttgttgttattgaaacagcacttctgtttttgagtttgttttagctaaaaagaaggaatacacacaggaataatgaccccaaaaatgcttagataaggcccctatacacaggacctgacatttagctcaatgatgcgtttgtaagaaataagctctagtgatatctgtgggggcaatatttaatttggatttgattttttaaaacaatgtttactgcgatttctatatttccattttgaaactatttcttgttccaggtttgttcatttgacagagtcagtattttttgccaaatatccagataaccagttttcacatctgagacattacaaagtatctgcctcaattatttctgctggttataatgcttttttttttttttgcttttatgccattgcagtcttgtactttttactgtgatgtacagaaatagtcaacagatgtttccaagaacatatgatatgataatcctaccaattttcaagaagtctctagaaagagataacacatggaaagacggcgtggtgcagcccagcccacggtgcctgttccatgaatgctggctacctatgtgtgtggtacctgttgtgtccctttctcttcaaagatccctgagcaaaacaaagatacgctttccatttgatgatggagttgacatggaggcagtgcttgcattgctttgttcgcctatcatctggccacatgaggctgtcaagcaaaagaataggagtgtagttgagtagctggttggccctacatttctgagaagtgacgttacactgggttggcataagatatcctaaaatcacgctggaaccttgggcaaggaagaatgtgagcaagagtagagagagtgcctggatttcatgtcagtgaagccatgtcaccatatcatatttttgaatgaactctgagtcagttgaaatagggtaccatctaggtcagtttaagaagagtcagctcagagaaagcaagcataagggaaaatgtcacgtaaactagatcagggaacaaaatcctctccttgtggaaatatcccatgcagtttgttgatacaacttagtatcttattgcctaaaaaaaaatttcttatcattgtttcaaaaaagcaaaatcatggaaaatttttgttgtccaggcaaataaaaggtcattttaatttaaaaaaaaaaaaaaaaaaaaaaaaaaaaaaaaggcca

SEQ ID NO: 6415 - protein, 361 aa, Homo sapien
MWVLTPAAFAGKFLSVFRQPLSSLWRSLVPLFCWLRATFWLLATKRRKQQLVLRGPDETKEEEEDPPLPTTPTSVNYHFTRQCNYKCGFCFHTAKTSFVLPLEEAKRGLLLLKEAGMEKINFSGGEPFLQDRGEYLGKLVRFCKVELRLPSVSIVSNGSLIRERWFQNYGEYLDILAISCDSFDEEVNVLIGRGQGKKNHVENLQKLRRWCRDYRIPFKINSVINRFNVEEDMTEQIKALNPVRWKVFQCLLIEGENCGEDALREAERFVIGDEEFERFLERHKEVSCLVPESNQKMKDSYLILDEYMRFLNCRKGRKDPSKSILDVGVEEAIKFSGFDEKMFLKRGGKYIWSKADLKLDW

SEQ ID NO: 6416 - DNA, 4254 bp, Homo sapien
agctcgcccaaagagatacaacctaatccccaacctacttttagttttttttgtttttttttttatggttaaaagtaacttttgtagtttaaaaaaatctttcctctttcatataaataagaagtggaaattgcctttttattgtgtaatgtagaaaaccctcaagtgttttttccgagcttgggaaagattttgtgtaggaaatgtgcatagagtttgtattttatttttattagcagctgaaatgcctttggttttggcttctctctctccctctctctctctgtctctccttctctctctccccccaccacccacccccacacacgtcatctgcattgttattggagcctgtacttagagggattaagcccacaccctggcttccattccatatcaggtacaggatttgatgttattaacatttgtcgtcatacctcataagtcggtccctgccttgtctgtctaggcccatttggggctccctgtgagtgattcccctctctctgctatgctggagacggttccagcctggaaagcggccaagttcatcttctcactgtgagtggaagctggatcgggcccccgtagtcctggcagccctgttgtctggagggttcttgttgtccctcccattagccagggcggagactgtctgagctgtgcaggaggagggttgctagtaggttctgcttctgcttctctctgctccactgtctgcagcccagatcctgttgggcctggctggtgtctggtaaccatgggcctccactgacccatccctctcttttaaactgtcaggtcattatcaggcataggcagcctatagggcccaaagaaggcaaaaagataagatttactcaagtagcatttgggcaatgaggaaggaaaggtttcaaatttaggggcagaagtgagagaatgagccaacccatgtacctgctgcaactgaaccagactgggttttcaaggctcccagacgtagagtaggaaacgtgctcttctaaatgaggagggagaagataaaggaaacttctagcccctgtccttagtgctttgaggattttattttctcccttactacgcttgcttgacgtcactctctctcgacctccaaacagcaggactctttctctgggaaaccgtccttccaaaacggaatctatgtagacaatgggacattaggcagagagctcagatggcccttttaagggggctccaagaaccaacatcactgctcttttagataaacctctgccctccactccttgcttgagtgggttaaaggaactaacagttgtccctttaggaggacaaaatggggtcaagaggacacagaagagttgtatagcaccagattggttccaaataattaatggatgtgtgcacattttctgttcagggattaagaccagaatatcagtggatttgttttccccaccaagtggcctcttagactagtcattaacttatggttagctctaaagatttcaaatagtggcagacagtgtcttctgaatgtaagttttgagaaatacgagtctgtcagagcggccataagccataaagagtcaatctcttcattatatttttcatcatgtaaacaagtttcccatttccctttcttagattgcaccagtgaaggagatgttttgcaaagattcagagaactaatttttcactggataagacctgagtaacccagaccccccaccgtggttcttttcacagccctcgactttgcacttaaaaagggatattgtaaatgaaaggctgcagtgccagttttaagaaagaatttctgtgaagtgtgaggactctggagtctagctcacataaagagagtgttatataaaaatccgacagctgaactaggttgctcttttttggcagggagtggggatgagatttgacaccaatatgggcaaaattagataaccttttggttaatataaatgattttgatttggaggcctaatttgtagattgtgaaagcagcttttagtttaacttattcacagaccccttataattaccatgtttttttttttcttcctaaatctcttggttcagcttgtgaatcttacgtgcccgtaaagttgggatgttgaattggctcttctttgttctggcagtgagtcaagtgtccagcattttttcataagtgttttttaaaattgttctccagcattttatggctcctccctcccatgtcctcagacccagcaaaagcgtagaggcagaattagaggcctctccaggccagctcctctgcccacatgtcatacaaggtgtgaatttgagcacagtccagaaatggagacatcccacccccagttgaataatggcccattcatgccaaccttgccaacacggagagggcagagatgcactagaagaccttcatcctccccttcctctgccccaagtcactacagttggttctattgaagccagtctttaagaaacctgggttaaagacaccagcacttctgcttgctgggctggctggacctgtgaagccatgggcaggtagtgccctcttgagagtcattttatttggccaccttcaggtgagactatccatagacacatgctaggataggccccgctgggagggcagttacaggagagagtaggtggtggtgacgtgagggctgtgaaggatccagagacaagacttagatgtttcgttcattcactcattcattcagttactcctaagacttttcagtttcataaggaagagtgttgcctgaggccctagggaatattggggaatagaagggattgaggaaacattaataatagttattcaaaagacccaaatgcttatacttctctctcccttcttctctctctgacacacacacacacacacacacacacacacgtgcacattcctcccttacatgctcatttgtgccttaaatgtgccttataggtaaatccaggatgacaggaatccctcgtcactgggagattttgtatatattcttttattattagattgagttgggtgtggggaaaaatttttttctgaaggctcaaaagtggtttcctaaaagtgagccactatcagatttgcacatcaggagaaaagaaatagggttacgtccattaggaaaatcccagtttgcaggagtgcaatcacatcaaaaaaacaaccagccaggattaaaggtattataaatcctcatagcggaacatttctcagggcaaaggaacctggctcatttgaagattaatgttccatgcctttgtggtcaaagggtcagcacttaacacaggaaaaaactaggtgttgttttgttttgttattttggacaacataaaattcaggaatgttttatttagccttggtttctagaaggaagggaaataatatttcttgagcatttactagggtgttgcgtgctgtgctaagtaaattttaagtctttcagttttatagatacggaaaacaagggtgactctttaccacaggatgaataaagaactaagtaatatgggaaatgcagcaatttctggactagctgagccgattccttcctgtgagcacactgtaagctttcaagttctctgggcaggaattacagcacctgtcccctgcaatggccctgctgtgtgatgctcatcgcttcccttcgtgctggagcagtcccccaggtgtccatctcctatctttttgttccaatcttctgtgagttccagctagcaggctttacatctggggaaaggaaaaccaggggttttagctctgttctctgctcccatccttcgctcaccagctgagtgagaacatgaactttttgcaccatgtacccatggcttacactacttagaaaatcaccttttcagataaaacagtttatgagttcatagagaacaccagcactctttgacaaaactgtgagtgaccctttttaaacaatgctgagcaggccctgagctataatcaacggtgagctttaatgtctatgctgacagttaggttttgctctcttttgtaacaggttacgtagaccagcagtgtttaaatctaaatacgttgtgagtctgttatctgtcctatcgcgttttttaaatgactttttattctttatcatagctaagtaaataccaaaaaaaaaaaaagctttgtaggacacttgtacttagtttgggaaaaaaaaataaattgaaattgttatgcttttgtatttccatttcttgcaaataaatattttttcttaaatagtaaaaaaaaaaaaa

SEQ ID NO: 6417 - protein, 50 aa, Homo sapien [sequence omitted]

SEQ ID NO: 6418 - DNA, 1444 bp, Homo sapien
gtttctcttatttatgccttgaggactaatttctggttttctagctgttaatgcactgttgaccttcataatggtgccttacgcaagcgatcccttctgtgggggtctcatacaggggtgtgggcgatgcatgctttattaaggctcttgtttcacctggcagtgtactgtatcaacgtataatacagaaaaaaaatctctttaaggtcctccttcacaaagacatagagtgaaactccctttacatgtcagtatttgttcaacactttaggcaacttgactgtcagtgttaaaatggaaaacaggaaaatggaaaaatctgaccaattctgccaccctgagactttcatatagaccttgcacaacaattgtatagatcacacaccggctgtatttaatatgtaacattttcacacatattaaagatacagaagtattaaaaaacccccaatgttaatgtatttgcttaaaaggcacaagtttcacatatctgtctagctatctgttggtaatacagaaagtatactacttttttaaaaaagtgggcagaattcttgtgtatgtatatttgtgtgtacagtatgtgtatgtgtgtatatatatatattatatatatagataatatataaatattttttttaaggagaaactagaacgtttagctagaaaattccacagcctgtgaagaaatatttcaaaatggccataaaggaggtaaaaatgaaaaaccataacctaacttttatagaggctttatctttaatttaacgatgtgcggaggactttcttgcttgaatctgttccgggctgtctgctctgtccatcaaatgggcaggtctggaatgaggcaccttcggccgttcagaagtggcctgaacagaatgctggaacccaggctggactcggacacactaaggttttgattttgaatttcagccttattagaagatctaacctaagagtaagctaaccacagggattcttttgtagaacactttttatgcagatgaagctattttttccagcaagtagattcttccagtttttccaaggagtaatttccccgaattggcataccacggcgtggacagctgatatttcacccagctgctggcttgtgggtgtggctctttgctttatatatatatacacacatgtgagtctggctgggctggtattttgtttgatcttcctggaaatgagcagtgactaacgctcacataactggtttttttttcttatctgggctgatgaatacatttacctaagaaactcatttcgttttacttaagaggggaagtgcagttttcttttggcagttcagaatccaagcacttgatttgctgggtttggaaaactccttttttggccttctatgtgcttagccataacaattccattaagcaagaaggtaagcaaaagacaaaaaaaaaaaaaaaaaaaa

SEQ ID NO: 6419 - DNA, 7136 bp, Homo sapien; identical to SEQ ID NO: 3195

SEQ ID NO: 6420 - protein, 418 aa, Homo sapien; identical to SEQ ID NO: 3196

SEQ ID NO: 6421 - DNA, 2848 bp, Homo sapien
aaacttcattgagcacctgggtcgttttcctgctcatatcctggactgtctttcagggatttactaccggcttccgggacttgagcaagtcttgaatacgcaggatgttcaggatgttcagaacgttcagaacattttagaaatgctgttgcgactcctggacacttaccgggacaagattcccgaggaggccttgtcaccatcctacctgactgtgtgtctgaaactgcatgaagccatctgcagcagcacaaagctacttaagttttacgagctgccagccttatctgccgagattgtctgcagaatgattagacttctatctctggtggattctgcaggacagagagatgaaactggaaataattcagtccaaacagtcttccaagggacccttgctgctacgaaaaggtggctccgagaagtttttacaaagaacatgctcacatcttcaggtgcctcattcacatacgtcaaggaaattgaggtctggaggcggctggtggaaatccaattccccgcggagcatggctggaaggagtcgttgctgggagacatggaatggaggctcacaaaggaggaacccctctcccagatcactgcctactgcaatagttgctgggacaccaaaggcttagaggacagtgtggccaagaccttcgagaaatgcatcattgaagccgtgagctcagcctgccaggtgaacaatctctcctcctgggaaacggattcgggctcacagctgtgttctgccatgacccagctaagggctatgaagcacccgctgggtctcagctcctccgctaactcagagattgggaagtgggcaccctcctccctcgccaagggcaatggcgctgagatctagttctctccggattcctcagtgtgctgcacagtccctgctgctcgcaccatcctgcatgtgttccatatggaatcacggccgtgcgcgtgtggcacaagtcacacgggcttgcaggccgttcctcagatggccctgtcgtcactgtggctgctggtttgattgattgttaacacttgctcagtaggtgtgcgggaagagactccaaaggttgacagaacatttatggaagcaaaatatgtgaaatggaaaattgtatcaatttatttagctcttttcggcaaaggggaagagattgtgcccccctgtctcccaggaacagtctcgcaggcaatgccacatgaggaagctccctgctggccatggctgccctgctcacatttcctaattggacacttaacccctgtacaagcacagccttgcggccacaggggaagtccagaaacattgaggtcattgaattccggggaccaaggggttctaattttttaagtgactgatacctttgataaggttttcctttccctttttcgttaactctttgttgagatattgttcgtatgccatacggtacatctgtcaaaagttccagttcagcaggttttggggtagtcacagatatgtacagtcatcaccacagttaatgacagagcattttcatcacttcaaagagaaacccggcccctttagccatcatcctcctcccctctagtcacccactcccctctgcaggcataaacaattgctgaacataaacaactgcttctgtggctttctctgttctgactgtcatatgaatggaatcatatcatatgtggccttttgggtatggcttatttcactgagcataatgtttttttgttgttggtggtggtggttgtttgttgtttttgggaccgagtttcactctttttgcccaggctggagtgcagtggtgcgatcctggcttaccgcaaccactgcctcccgggttcaagtgattctcctgcctcagcctcccaagtgctggaattacagctactttttgtttaaagagtcttttaattgtttaaagaacaatgtgccgccacactcggttccttttgtatttttagaagagacagggtttctccatgttggtcaggctggtctcgaactcccgacctcaggtgatccacccaccttggcctcccgaagtgccgagattgcaggtgtgagccaccgcgcccggccgagcataatgttttgaaagaccgctcaggctggacacggttgctcacgcctgtagtcacggcactttgggagcccaggagttcaagacaagcctgggtaacagagtaagaccctgtctctataaaaactaaaaaataaacaaaaaaaattagccaggcatggccgggcacacctgtggtcccagctacttgggaggctgaggtgggaggctcccttgggcccagaaggtcaaggcagcggtgagccatgatcgcaccactgcacttcaacctgggggacagagcaagaccctgtctcaaaaagcaataacaacaaaagtccatccatattgtagcttgtgtccgtttacgttaagtattccttacccaaaatgcttgagaccagaagtgttttggatttcagatgttttcaaattttggaatatttgcatttacataatgagatgtcttccagatgggacccagagtctaaccacaaaattcacttgtttcatatacatcttatacacatagcctgaaggtaattttatacaatatttttaacaattttgtgcatgagacaaagtttgtattaagtatttgtatgttgaatttttcacttgtggcatcattatactcaaaaagtttggattttgtagtattttggatttggggattaggaatgctcaacctatatttcatttttttccatggccaaatattccccgtttatccatgtgtccattgacggccatctatgttgcttcttcggctattataaatctgctgatac

SEQ ID NO: 6422 - protein, 241 aa, Homo sapien
MLLRLLDTYRDKIPEEALSPSYLTVCLKLHEAICSSTKLLKFYELPALSAEIVCRMIRLLSLVDSAGQRDETGNNSVQTVFQGTLAATKRWLREVFTKNMLTSSGASFTYVKEIEVWRRLVEIQFPAEHGWKESLLGDMEWRLTKEEPLSQITAYCNSCWDTKGLEDSVAKTFEKCIIEAVSSACQVNNLSSWETDSGSQLCSAMTQLRAMKHPLGLSSSANSEIGKWAPSSLAKGNGAEI

SEQ ID NO: 6423 - DNA, 3686 bp, Homo sapien
ccgcgcgtcccgcccctcccgtgcgccgctgacgcgccgtgctccggcgcaggcgcacaggggacggttgctggcccaggtgagcgggcgcgctggtccaggtgagcgggcgcgtccccgcgacggcgctgcctgcccgaggcggttcacgtaaagacagcgagatcctgagggccagccgggaaggaggcgtggatatggagctggctgctgccaagtccggggcccgcgccgctgcctagcgcgtcctggggactctgtggggacgcgccccgcgccgcggctcggggacccgtagagcccggcgctgcgcgcatggccctgctctcgcgccccgcgctcaccctcctgctcctcctcatggccgctgttgtcaggtgccaggagcaggcccagaccaccgactggagagccaccctgaagaccatccggaacggcgttcataagatagacacgtacctgaacgccgccttggacctcctgggaggcgaggacggtctctgccagtataaatgcagtgacggatctaagcctttcccacgttatggttataaaccctccccaccgaatggatgtggctctccactgtttggtgttcatcttaacattggtatcccttccctgacaaagtgttgcaaccaacacgacaggtgctatgaaacctgtggcaaaagcaagaatgactgtgatgaagaattccagtattgcctctccaagatctgccgagatgtacagaaaacactaggactaactcagcatgttcaggcatgtgaaacaacagtggagctcttgtttgacagtgttatacatttaggttgtaaaccatatctggacagccaacgagccgcatgcaggtgtcattatgaagaaaaaactgatctttaaaggagatgccgacagctagtgacagatgaagatggaagaacataacctttgacaaataactaatgtttttacaacataaaactgtcttatttttgtgaaaggattattttgagaccttaaaataatttatatcttgatgttaaaacctcaaagcaaaaaaagtgagggagatagtgaggggagggcacgcttgtcttctcaggtatcttccccagcattgctcccttacttagtatgccaaatgtcttgaccaatatcaaaaacaagtgcttgtttagcggagaattttgaaaagaggaatatataactcaattttcacaaccacatttaccaaaaaaagagatcaaatataaaattcatcataatgtctgttcaacattatcttatttggaaaatggggaaattatcacttacaagtatttgtttactatgaaattttaaatacacatttatgcctagaaggaacggactttttttttctattttaattacacataatatgtaattaaagtacaacataatatgttgtttctctgtagcccgttgagcatatgagtaagtcacatttctattaggactacttacaaggacaaggtttccatttttccagttgtaaaattggaaccatcagctgataacctcgtagggagcaaccccaggatagctaagtgttatgtaatatgcctagaaggtgatgtgaatgcgattcagaagcatagccactcccattttatgagctactcacatgacaaatgtcatcttttgctataacctttgccaagttagagaaaagatggatttaatgagataaatgaaaagatatttaacctaatatatcaaggcactatttgctgttatgctttgttatttatttcccagcacttgttccttattgtagattttttaaagactgtaaccttttactaactgtggtcttactaaaatttgtgcttgatactgcttttcaaaaagcctttaattagagccaaaaggatggaaaaggcaagatataaatgccttttatagatctcttatttacattgaaaattattaccatatgtttagagcaaatccaagaaaacttcaacagcttctgaagatgtctatgaatgttgaaaacttttcaatctcttggaatgctcagttatgttcctagaccggtctttgctgactactggttgttaacctttccctagcctgggacctcaagccatatatatcctttgggtgacccatggccaaagttattaagatgaactgactttcaaagtcagagaaggacagcatagggagaggcggttatttgtaagtcattacaggtagaacagggcagaaggaaaagtatgttctggagaaagggccatgttcctaactttggagatatgtcattgccgggaacctagtatcttccaacttgaattggtggcagctgttccagtgagacaaggcacatgtatgccttgtggctaagtgagcaaactgggtttccacttaaatgtttgggaccctcaattgattctttatttcaaacctttataaaaggtacagttttgtaagccattattaataattaatgcttatcggctgagccaccgttcccggcctattgtagattttcttaactacttgctaaggaaatcatatccttttacatgaactacaggtttagaacttggttttaagacaactgctatggccagaaggtaaatgggaattgccttattgaaggtaacattgattgcctaataagaaaatgaattgtttgccacagagttgaatttaatttgagttagatagttcagaatgtagcacttgccctataaatgaatcagatttgttctatttatataatattagaattaatatattatcatgtaagtgggaattttattttgttaagtggactctcaaattttagaacttgtgtgaaatatctcccagaaaacacaaaaggtttcaaggtatcacccaaagctagggaatcaacaaacgtactttattaatgcaagaccacaatttaagccccaggcaggaatccaacagtaacatttttcctttaggttaagcagtaatttttttgaattgtcatttttaatgggtctcacacatgcatattgctaatatcattcatgtttgaggttttcaacaaagaaccaatttattaatataatgtacaaaaatagttggttcattttctgaattcagtctttgaaataaaactccttgttttggccgtgtttctgaatgtattggtgattcacccccaagctaattttttaaagtcatttttgaagttgggaagtctcatgagagatgttgaagtatgtatttaatcaagagtcatgatttcaaactagttttacatattaagcagttagtgttctaatttaatgggtaaatgtgtgtttggataaatatctgaaaattttatccttaagtatatataattatttgcctcttatatgtcttaaagctatttaaacaaggtgttaaatgagccaaaacaattaagtaattagaacagtacatttttatcagtctgtcatatgcaatgaatgtatgtaatactaaaaaatcatgactacttttatcaaagaaaaaccacacattaatcctattaatcatgaaagcgtagcattgtaaattaaaggttttctttgaggctcttgaaagtgatcccattgctttcctgttttaaaaatattttatgctctttatttccacttctgtgaatgtgatatttctattttgtgattatgttactgaataaacaaacttgctacataaaattcttagcaatt

SEQ ID NO: 6424 - protein, 189 aa, Homo sapien
MALLSRPALTLLLLLMAAVVRCQEQAQTTDWRATLKTIRNGVHKIDTYLNAALDLLGGEDGLCQYKCSDGSKPFPRYGYKPSPPNGCGSPLFGVHLNIGIPSLTKCCNQHDRCYETCGKSKNDCDEEFQYCLSKICRDVQKTLGLTQHVQACETTVELLFDSVIHLGCKPYLDSQRAACRCHYEEKTDL

SEQ ID NO: 6425 - DNA, 2983 bp, Homo sapien
tctaaggtagcgagggaggcgaagaccgcgcgcgcctcagacgccccggccgacgaacgcgcttgctctgtctgcgggttcctaaccttgaagctaggccagtgaggggcgaacaagacctggtctctactctcggccagtatatatgttggcgggcgtcggggggacggggtagggtaagtgacagacgtcagaccaggcagccagattaagtcaaaccctgtcgtttcttcctcaagaggagctcggttctgcctgccccatcagcctcactgtcactacctcagtttaggtctgttgtttgcaaacttagcaatagagttgaggagagatgcttgctaaaatgcggattcctaggcgccccgagataggaactctggagctatggagtaggacccttttgatttttgctgaagcctccttattattcaagccattctgagctttttgaagattgagtaattcttgtggggggcattgttagcagccatttggaaatgaacttcagggagatgttgttggagccttccagccagaacagtgatattaaggaactgaatactatatgtgacatactgcagttaacatatagcaataatgactctcttttcgccccctaggaatgggtgaatttaaggtccatcgagtacgtttctttaattatgttccatcaggaatccgctgtgtggcttacaataaccagtcaaacagattggctgtttcacgaacagatggcactgtggaaatttataacttgtcagcaaactactttcaggagaaatttttcccaggtcatgagtctcgggctacagaagctttgtgctgggcagaaggacagcgactctttagtgctgggctcaatggcgagattatggagtatgatttacaggcgttaaacatcaagtatgctatggatgcctttggaggacctatttggagcatggctgccagccccagtggctctcaacttttggttggttgtgaagatggatctgtgaaactatttcaaattaccccagacaaaatccagtttgaaagaaattttgatcggcagaaaagtcgcatcctgagtctcagctggcatccctctggtacccacattgcagctggttccatagactacattagtgtgtttgatgtcaaatcaggcagcgctgttcataagatgattgtggacaggcagtatatgggcgtgtctaagcggaagtgcatcgtgtggggtgtcgccttcttgtccgatggcactatcataagtgtggactctgctgggaaggtgcagttctgggactcagccactgggacgcttgtgaagagccatctcatcgctaatgctgacgtgcagtccattgctgtagctgaccaagaagacagtttcgtggtgggcacagccgagggaacagtcttccattttcagctggtccctgtgacatctaacagcagtgagaagcagtgggtgcggacaaaaccgttccagcatcacactcatgacgtgcgcactgtggcccacagcccaacagcgctgatatctggaggcactgacacccacttagtctttcgtcctctcatggagaaggtggaagtaaagaattacgatgccgctctccgaaaaatcacctttccccaccgatgtctcatctcctgttctaaaaagaggcagcttctcctcttccagtttgctcatcacttagaactttggcgactgggatccacagttgcaacaggcaagaatggggatactcttccactctctaaaaatgcagatcatttactgcacctaaagacaaagggtcctgagaacattatctgtagctgtatctccccatgtggaagttggatagcctattctacagtttctcggttttttctctatcggctgaattatgaacatgacaacataagcctcaaaagggtttccaaaatgccagcattccttcgctctgcccttcagattttgttttctgaagattcaacaaagctctttgtagcatcaaatcaaggagctctgcatattgttcagctgtcaggaggaagcttcaagcacctgcatgctttccagcctcagtcaggaacagtggaggccatgtgtcttttggcagtcagtccagatgggaattggctagctgcatcaggtaccagtgctggagtccatgtctacaacgtaaaacagctaaagcttcactgcacggtgcctgcttacaatttcccagtgactgctatggctattgcccccaataccaacaaccttgtcatcgctcattcggaccagcaggtatttgagtacagcatcccagacaaacagtatacagattggagccggactgtccagaagcagggctttcaccacctttggctccaaagggatactcctatcacacacatcagttttcatcccaagagaccgatgcacatccttctccatgatgcctacatgttctgcatcattgacaagtcattgccccttccaaatgacaaaaccttactctacaatccatttcctcccacgaatgaatcagatgtcatccggaggcgcacagctcatgcttttaaaatttctaagatatataagcctctactcttcatggatcttttggatgaaagaacactcgtggcagtagaacggcctctggatgacatcattgctcagctcccaccacccattaaaaagaagaaatttggaacctaaaacagggcactgtctgtgtccttccttgaactgtctaccctgttgcttttcacaaatcatggtaataaaacaagttattcttgaggactagtcattataaatgttttcttccaaaataatggacagtcatttcccttcattgaatgaaaatgaatggaaattccaaatgaggtatttgtattggggataatgtgctcagtagctacaaactcatctaatgttgattgagtcctgcttattctgtaggccgcaatctcagaagaaaagatatttgtgttctgttccctattacatgcctaa

SEQ ID NO: 6426 - protein, 686 aa, Homo sapien
MGEFKVHRVRFFNYVPSGIRCVAYNNQSNRLAVSRTDGTVEIYNLSANYFQEKFFPGHESRATEALCWAEGQRLFSAGLNGEIMEYDLQALNIKYAMDAFGGPIWSMAASPSGSQLLVGCEDGSVKLFQITPDKIQFERNFDRQKSRILSLSWHPSGTHIAAGSIDYISVFDVKSGSAVHKMIVDRQYMGVSKRKCIVWGVAFLSDGTIISVDSAGKVQFWDSATGTLVKSHLIANADVQSIAVADQEDSFVVGTAEGTVFHFQLVPVTSNSSEKQWVRTKPFQHHTHDVRTVAHSPTALISGGTDTHLVFRPLMEKVEVKNYDAALRKITFPHRCLISCSKKRQLLLFQFAHHLELWRLGSTVATGKNGDTLPLSKNADHLLHLKTKGPENIICSCISPCGSWIAYSTVSRFFLYRLNYEHDNISLKRVSKMPAFLRSALQILFSEDSTKLFVASNQGALHIVQLSGGSFKHLHAFQPQSGTVEAMCLLAVSPDGNWLAASGTSAGVHVYNVKQLKLHCTVPAYNFPVTAMAIAPNTNNLVIAHSDQQVFEYSIPDKQYTDWSRTVQKQGFHHLWLQRDTPITHISFHPKRPMHILLHDAYMFCIIDKSLPLPNDKTLLYNPFPPTNESDVIRRRTAHAFKISKIYKPLLFMDLLDERTLVAVERPLDDIIAQLPPPIKKKKFGT

SEQ ID NO: 6427 - DNA, 3857 bp, Homo sapien
cactggtctgctactgttaagttgtatgccattttgttaggccttctcaagtgggaatcaggaacgctgctgtgctctagagatgttttgttcttcctgtagggctgaagcagtgcctactcgatagaatcagtcatcatgcaaataaaagccacctgagtcaaaggcaaagccagagtgcagcttggagcaaagaagttaaaagcatattggcagaggaagagccctggcattccagcaggagctaacaggaaaaagaaaatcaatggcagtagccctgacacagccacttctggtggttaccactcacctggggattcagcaacaggtatctacggggagggccgtgcatcctctactaccctggaggatctggagagccagtaccaagaactagcagtggccctggattcaagctccgcaataatcagtcaactcactgaaaacatcaattcactggttcgcacatctaaggaggagaagaagcatgagatacatctggtacagaagcttgggaggagcttgttcaaactcaaaaaccagacggaacaacgagaacaagagcacactgcagttggagcagcaagtaaaggagctgaagaagtcaggtggagctgaagagccaagaggctccgagtctgcagcagcagccagaccagtagctggagccccagtcccacaaggagcttggatgtgcggacaagcagggtggactccccaggagcacccaggcttgagtggagaagctgttggtacaggagaggcggcaggaggagcaggagaggctgcatgccattcttttcgggctgcggagaacagggagctaaacatcaccatcatctaagagcgggtcaaggaattgaaaaaaaaaaacaaaacatttaaggggttaatatcctacacaattcatttacttcatttgaatgttagagccacttatgtttatttgtgtttctaatttatagtttaaatttatttgtgtttctaatttatagtttaaatttatttgtgtttctaatttatagtttaaatttatttgtgtttctaatttataatttaaatttatttgtaaaaagttaaatgagagtgggtgtttctctcatgttcactctggcatcttttagcatttttttaatttgataattataggacgttagcatgcatatcgagtttgcccttatgtggtgggagttcaaacacacaaagacccactgtatgcacacaactgttcttgctggtttgggataggctgccatgcttttttaatgttagtacagcctgtatattcattacggaattcagataaaatttccttatgttctgctgttatgtttgatcgaatcctaatcacagtgagctcttcattagctcaatatgcagtttgccctcaagtgcgcggtctattactttgtaatatgccactgtgagtactgacatttacagttgtttaaaggtggagcactggaaacagcctttccccctttttctgtgtattggggatgggagtaataacattttggggaggtttttaaatctcccagaagaggaaagtggcctgctttggcaggtgtgtgcaggatagaatatgtttcatttgttccggtgccaagaatgagcgctgtactacggtagttcccttaggatttgtatgtgctctgggctcatgaagatactgcctcatgagctgtggcagttgtactcttttttgatgacctgaaaagggattatttctgaggaatgaaaggctcccatcatgactgtggatgtggaaaaccttttctagctgagagcatttatatctacaatacattttaaagtcagagttcatgttccctgttttaatcacatgactacatgtcccagtacacaaaagggcactggttggcgttctccttaatgtatttagtaaagatcagaagaaatcctttaagagtttaaatgccctggaacagcatatacaggctctagtcaagaatgaattcgagtgaaggaaagctgtgtgacacctggcattcctctgtgttcatggagcttatttgaggctagaagatggattttaccatctagacctctctggctaatagctagtcttcaaccatctgacataggaatttacttcttttccttgaatggagaacactttaaaaataataacaaacattattataaactaatatatgtgagagtacttagttgaaacaaaaaggagttttagtagacagtattatactacatttgaaaatcaaggagcagtttatgcaacgtaaaacgtttacaaactgcagcacaatctactgttcgtgaatgtcaaagtgtcatgaggaaagtgtctatacaatcacagagttatatttcctcacaaagttctttacaaagagtgaaatatgtttttatacctctcagtttcagttagaggcatattttgtgtaatatttatggcttaaaatggactaaaggtcctgttcttgccttgtctgaacttgccgcttttgcattctttgagttcagtttaaagacagttactttaagcccattttaaaccctcaggctagaaatcgtaccactgttaattagccacattatttggtctaacagtttatcattctgaaactgagcttacctaatacattgataaattatttcaaaggtatttttatagttcaaatcgcttcacttttaccctgacacgtataaatgactaggaatgaccttcagatagcgtttagcaactgtaaccaatctgacaataatgtgttcatcaggtacctgtggattaaatcacatactggcatatttaagctgaatgtcagtctgaaaaataaatgtactatattaactcaaataccactctctgtgtaggtattttgtcatatgtttaagaaaaagctaaagagaatggaaatcctatgacaataactatgacaataactatgacaagtctttcttcaaagtgcatgcagtcttttgcagtacctcattcagccaagtatttgttctctacctcattcagtataaggcagcctttaatttgcttagaaggcaacattagaaggttagagttcagcaggaacatagaattttaaaatgtgacttcaactgaataaatttgaatttctgtagggagtaaagaatcaaaacacctatttaaagactgcaaaatatgataattatttttaaagtaattgattaaacctggtaggttttcccaaaatgaaaaacaatcagttctaaaaccaaagctgatttttagaaaatgtgaaaatgtaaatcaaccctatccataatagattctctaaaactttatcttacagtcactttcaaataactattcaaaaatgtaactgctatattaacgtcttaaaataatttaaaacattttaaaatatgaatactgtagtttaaaacaaagaatctaggggaaggaaaagtagacaaagaaatgccaattccagtccaaagctgtatttgccaagttttcttagaatgacttttaccgatttatgaattcttatacacagaatgcataatggaaatactgatttttgtctaaagtggcattattgactgctgctgtgatgctactgtaatgtaatacattattaaattgtttcaaggtgctgttttgcctaaaaattttgtgtgtcttgaaaactatagtattgggtattgagactctgcaaattctcggcatgcttggcatgaaggtaatcggtttttattcttacaaaattgtaactatgtaagtgtgtttattaaaagaacacaaactaaaaaagttaacaggaattaaagttgtgggatgaaaaagttacaggataaaaaaatactgtggaaaagtggcaaaaaaaaagttgtgg

SEQ ID NO: 6428 - protein, 118 aa, Homo sapien
MRYIWYRSLGGACSNSKTRRNNENKSTLQLEQQVKELKKSGGAEEPRGSESAAAARPVAGAPVPQGAWMCGQAGWTPQEHPGLSGEAVGTGEAAGGAGEAACHSFRAAENRELNITII

SEQ ID NO: 6429 - DNA, 1482 bp, Homo sapien; identical to SEQ ID NO: 3885

SEQ ID NO: 6430 - protein, 321 aa, Homo sapien; identical to SEQ ID NO: 3886

SEQ ID NO: 6431 - DNA, 2587 bp, Homo sapien
cccgagccccgcccctccgggcccgggtcggcgcgcccagcctgccagccgcgctgctgctgctcctcctgctgtgggaccgctgaccgcgcggctgctccgctctccccgctccaagcgccgatctgggcacccgccaccagcatggacgctcgccgcgtgccgcagaaagatctcagagtaaagaagaacttaaagaaattcagatatgtgaagttgatttccatggaaacctcgtcatcctctgatgacagttgtgacagctttgcttctgataattttgcaaacacgaggctgcagtcagttcgggaaggctgtaggacccgcagccagtgcaggcactctggacctctcagggtggcgatgaagtttccagcgcggagtaccaggggagcaaccaacaaaaaagcagagtcccgccagccctcagagaattctgtgactgattccaactccgattcagaagatgaaagtggaatgaattttttggagaaaagggctttaaatataaagcaaaacaaagcaatgcttgcaaaactcatgtctgaattagaaagcttccctggctcgttccgtggaagacatcccctcccaggctccgactcacaatcaaggagaccgcgaaggcgtacattcccgggtgttgcttccaggagaaaccctgaacggagagctcgtcctcttaccaggtcaaggtcccggatcctcgggtcccttgacgctctacccatggaggaggaggaggaagaggataagtacatgttggtgagaaagaggaagaccgtggatggctacatgaatgaagatgacctgcccagaagccgtcgctccagatcatccgtgacccttccgcatataattcgcccagtggaagaaattacagaggaggagttggagaacgtctgcagcaattctcgagagaagatatataaccgttcactgggctctacttgtcatcaatgccgtcagaagactattgataccaaaacaaactgcagaaacccagactgctggggcgttcgaggccagttctgtggcccctgccttcgaaaccgttatggtgaagaggtcagggatgctctgctggatccgaactggcattgcccgccttgtcgaggaatctgcaactgcagtttctgccggcagcgagatggacggtgtgcgactggggtccttgtgtatttagccaaatatcatggctttgggaatgtgcatgcctacttgaaaagcctgaaacaggaatttgaaatgcaagcataatatctggaaaatttgctgcctgccttctacttctcaaatctttcttgtaaaagtttccaattttttcactgaaacctgagttaaaaatcttgatgatcagcctgtttcataagaaactccaatcaagttaatcttagcagacatgtgtttctggagcatcacagaaggtatattgctagttacactttgccctcctgcagtttcttctctgctcccaacccccatctcatagcatccccctctatttccaatgctcctctccaaccgcttagtttctgaatttcttttaaattacagttttatgaaagcatattttatttacttggtgttgaaatagccctcataaaacctaagcacttggaaacacaataatagtattaactaactagatctattgaatttcagagaagagccttctaacttgtttacacaaaaacgagtatgatttagcattcatactagttgaaatttttaatagaatcaaggcacaaaagtcttaaaaccatgtggaaaaattaggtaattattgcagattgatgtctctcaatcccatgtattgcgcttatgttacaagttgttgtcacagttgagacttaatttctcctaatttcttctgcccgaagggtaagtggtgcgtccagcttacacaatcataattcaaaggttggtgggcaatgtaatacttaattaaaataatgatggaagagctatctggagattatgagtaagctgatttgaattttcagtataaaactttagtataattgtagtttgcaaagtttatttcagttcacatgtaaggtattgcaaataaattcttggacaattttgtatggaaacttgatattaaaaactagtctgtggttctttgcagtttcttgtaaatttataaaccaggcacaaggttcaagtttagattttaagcacttttataacaatgataagtgcctttttggagatgtaacttttagcagtttgttaacctgacatctctgccagtctagtttctgggcaggtttcctgtgtcagtattccccctcctctttgcattaatcaaggtatttggtagaggtggaatctaagtgtttgtatgtccaatttacttgcatatgtaaaccattgctgtgccattcaatgtttgatgcataattggaccttgaatcgataagtgtaaatacagcttttgatctgtaatgcttttatacaaaagtttattttaataataaaatgtttgttctaacttgtctgcttttttaaaaataatcttactgtacttaattctaattttttcctcatatttaaataaaaggccatttccaccttttct

SEQ ID NO: 6432 - protein, 371 aa, Homo sapien
MDARRVPQKDLRVKKNLKKFRYVKLISMETSSSSDDSCDSFASDNFANTRLQSVREGCRTRSQCRHSGPLRVAMKFPARSTRGATNKKAESRQPSENSVTDSNSDSEDESGMNFLEKRALNIKQNKAMLAKLMSELESFPGSFRGRHPLPGSDSQSRRPRRRTFPGVASRRNPERRARPLTRSRSRILGSLDALPMEEEEEEDKYMLVRKRKTVDGYMNEDDLPRSRRSRSSVTLPHIIRPVEEITEEELENVCSNSREKIYNRSLGSTCHQCRQKTIDTKTNCRNPDCWGVRGQFCGPCLRNRYGEEVRDALLDPNWHCPPCRGICNCSFCRQRDGRCATGVLVYLAKYHGFGNVHAYLKSLKQEFEMQA

SEQ ID NO: 6433 - DNA, 1631 bp, Homo sapien
  Unsure 1482-1530: Unknown base
cttctcattagcattaactaggttattgcccagctttggagagccttcttttggcttatcatttattataagcccagaaataggtgactaatcagagataaatgtatgggttgtctgtatctagttttatgcctttttttttgcctaagacgtagtcaaattaatattttaactaatacatcttagcagagtttagttaagcacaaagttaacagtgggtaggattgaatcttgaaagtaatcatgtctgtaatgtttttcatgcatgcaaaaagcacagacaaaaccactcatgccctattaataaacaaaatacagatcaaagttttcaaaagtaatcactctatttattctaaatgtctgtggctttaggaaaataccaccagctagtacttacctatttaaagatgtagaatttattatcctctaatattcttatcagttgtttccacaactttagtttactattggactttcaaaaatttaaagaattacaagtaaaattcattaaacacttgtgtgtgaatagtaatacacagtaattagtacagcatgttgcttcttcaacaaattgagttttcagggaaatcagcaagtaaatgaaatataaatttttggtaaaagtatcaaacattcatcttgcccatttttcctcttaaactttattatctaatcaaacatagttttccataagatgtaataaaatatagataaggttggaatatttgaggatccatttgtggaactgaatttaatgagacttcattggtgatacactcaatttttactgggtaattagctaataatgttggtcactgtctcacagttcaagtagctttaagatgatgtggcaaggaaaacacaaagcttttgggtaaccagcgttcttaaatgtatggtttttgaccaggtgaaccctttagaagtgatttctgttttaaaagtatgtacttaaaatacctttggctgtgatgaatgtagatcccagcagaataccaaaatcctattttttttgactgagtatttgtagatgcttaatgactgaaatgaatttggaggcactgatgaaagtgatttttttaaagttctcaggtactgttcaattatttaatgttaagtttagtatcaagatacagttgtttttaaaatgccaaaatgctgtttattatacagaatattttattacatttgcaatatctttgtatatagtgatttttttcttgataataaatggaaaaattctaaaacacttgctgaaattttgttgctatttaacttttaaaatatcagattttcttcatatttatagcatcttcctaacaggaaaaggtagttttagttgcttagaaacattagacatttttatggaatgctgttgctgaatatggttgcatttgtaactgtcctttgaaataattttgtagagtactgaagtgcctttttacaagatttttttcctttttccttttctggcttaaccannnnnnnnnnnnnnnnnnnnnnnnnnnnnnnnnnnnnnnnnnnnnnnnngtactaggacggtttctgctgaggctctcctcctggcttgcagagggctgccttcccatcatcctcacatggtagagagagagaaggatggagatctaggg

SEQ ID NO: 6434 - protein, 114 aa, Homo sapien [sequence omitted]

SEQ ID NO: 6435 - DNA, 1993 bp, Homo sapien
actcatttataccaggaaacagacaagagaacaagaggctgccgaagacaaaacttctctgcaagcacctgtgcacagcaatgtgcgtgggcatctgtgagaagaagagaatctgtgaagtttgagcaagcggccttcccaagatgtaccgaatatctcaactgatgtcaacaccagtagcaagttcttccaggttggaaagagaatatgctggagagctgtctcccacgtgcattttcccaagtttcacctgtgattccctggatggttaccattcttttgaatgcggctccatagatcccctgacaggctcccactatacctgtcgccgaagtcccagactcctcaccaatggctactatatttggactgaagacagcttcctgtgcgacaaagatggcaacataactctgaacccatcccagaccagcgttatgtataaggagaacttagttagtacctccaaatcttggctgcatggaagtatctttggtgacatcaactcttctccaagtgaagacaactggttgaaggggaccaggaggttggacacagaccattgcaatggaaatgcagatgatttagactgttcttctctgactgatgactgggagtcagggaagatgaatgcagagtctgtgatcacctcctcttccagccacatcatatctcagcctcctggaggaaactcccatagcttgtctcttcagtcccagttgacagcttctgaacgtttccaagagaatagttcggatcattcagaaaccaggttgttgcaagaggtcttctttcaggcaatcctgcttgctgtgtgcttaatcacttctgcatgtgcaagatggtttatgggagaaatattagccagtgtcttcacatgctcattgatgataactgtagcttatgtgaaatcattgtttctcagccttgccagctatttcaaaaccactgcctgtgctcggtttgtcaaaatttgacaaccatttaggaatgccttcgatgaatgtcctccatctgaatatctggaaattgtccaacttgcagtctacttggaatcaagtgttttattggaagggagtaagcgagtaatggagaaaaagccattttagtttgactatgtgattttaaaatgatctcagtttttccatcaaaattataatatgctcatgaaaataatattaatttgccttccctttgcaaacaccggcagttgaaaggaaaaggacggggaatgtgatggaaaagagaccgcctggaataaatgtccccctatgattctttaaggcagtggttctcgagcttgaattttcattaggaaattctgtgaggagcttgtaaccagatttctgggtctgccacatgcacctatctcttgctgaattgctttaatagaataatgagagcaagtttgtctaactaataccaacctgacaacttgaataacaataaatgcaatttgtacataaaatataatgctgcaaaagtttgtcattcacctcagtggagtgacttgatattaggtggtaaccgtagatgatggttaatatgaaaatggacaggaaagaagcattttctgaaagttatattcttttgaaccacgttctaaaccaagtttttaatcttcttggggctcgtaattacctttcactttaatgtcacttaaagatataacacagaaaaatgccttgagggcaaaatataggcaaaacaccaatgcgctttcaaatgcatgaaaatggtgcagttgtacccttgagccttgactcaagggctgtagatgttccctttccaccccccacacttggtgcgtgttcacaaagcaaatatggcctgtaattcaaatttgttctatgtgatactctctgagtaaaaactcatacatgcagaaaattgtctttgctcgaaatgataatgccaaaatataactttatatataatttgcatttagtacatttttggttaaaaaataaactaataaataagtgaagtcatcagc

SEQ ID NO: 6436 - protein, 276 aa, Homo sapien
MYRISQLMSTPVASSSRLEREYAGELSPTCIFPSFTCDSLDGYHSFECGSIDPLTGSHYTCRRSPRLLTNGYYIWTEDSFLCDKDGNITLNPSQTSVMYKENLVSTSKSWLHGSIFGDINSSPSEDNWLKGTRRLDTDHCNGNADDLDCSSLTDDWESGKMNAESVITSSSSHIISQPPGGNSHSLSLQSQLTASERFQENSSDHSETRLLQEVFFQAILLAVCLITSACARWFMGEILASVFTCSLMITVAYVKSLFLSLASYFKTTACARFVKI

SEQ ID NO: 6437 - DNA, 4579 bp, Homo sapien
gctaagcgtcccagccgcatccctcccgcagcgacggcggcccgggacccgcgggctgtgaaccatgaacacccgcaatagagtggtgaactccgggctcggcgcctcccctgcctcccgcccgacccgggatccccaggacccttctgggcggcaaggggagctgagccccgtggaagaccagagagagggtttggaggcagcccctaagggcccttcgcgggagagcgtcgtgcacgcgggccagaggcgcacaagtgcatacaccttgatagcaccaaatataaaccggagaaatgagatacaaagaagtatgtatagtcattcatttaacattcagaatgcttctctctttttacaattggtttgttttggtgtgaagtatttttattttctcatttatatagactcaccaaatctcatcaaggttttttgttttttttagttttgattatacctttaaaaatattctactattaacacttctaagtttgtttctctacgttagtaacagaactcatgacatgatggtagatcctggatttctgttggcttgaacaactttacacttattgccaataaacctccttgagggtagggaccacatcttactcgtttttgtgctctctgtacttaatgcgtacataacatgtttaattgatgtacagtaaatataaatgctgccatttaaagttatagcattatcctttagaggtggaagagaactaaagttcatttagttcacaaagaaattgtaggcttgctcaagtccagctgtggggctatgctgaaattcgatggtctcctttattacatgattggtaggaaatttaacttcatgactaatgatggacagaaaggcacaaaagggaaaaagctctctaaagagtctccaccggacatgtagctccgggtgggacagcgggtcagtgcagaatatgacaatcacagccatgcagggactatgggaactgccagcagttctggtatcttacaagcttttgatttaaatacttaataggagattaagtctcaatgtggtctggatttcgaaatgtttcagaatttgtttttctagtaatggacatttgaaacaggtctcatgaggagataaggggaggcgctggagtgacagaactaatttctctctggcgccccctgctgtcgtgcagagtgaacatttaggaaatgagccctgctccccaggaagccgactctgcacagtggtctggagtgcctgaaaccagagcaagggtctccacctgtagcaccgagccctcattccctagagtcgcagtaagcttgggagcattgaagataaagcgagtatgggcatcagaattctctggggatatgtttacctatgtgtggaaagttcttattgacgtgaaaatattctagttttgcacacattttctataggtaactttaaaaattaacttgatatagagttttaaaaatgccagaatggtaggaaaatctatacttcttttagtaggagcccaggtggtttttcaaattcgaaccctctgtgctgactcttggtgagaatgtgccacagggccgggcccaggatgacctgtacgggtcagggctgaatattgtgtttctaacctggaagccttgttcactcatgctcacatatagttaattgccttctaatagttgtttcttatgctttgaagggactggttttcttttagaagtctaataattgacgatttgatatttctcgcctggcttagttgcggagcaggagctggccaacctggagaagtggaaggagcagaacagagctaaaccggttcacctggtgcccagacggctaggtggaagccagtcagaaactgaagtcagacagaaacaacaactccagctgatgcaatctaaatacaagcaaaagctaaaaagagaagaatctgtaagaatcaagaaggaagctgaagaagctgaactccaaaaaatgaaggcaattcagagagagaagagcaataaactggaggagaaaaaaagacttcaagaaaaccttagaagagaagcatttagagagcatcagcaatacaaaaccgctgagttcttgagcaaactgaacacagaatcgccagacagaagtgcctgtcaaagtgctgtttgtggcccacaatcctcaacatggaaacttcctatcctgcctagggatcacagctgggccagaagctgggcttacagagattctctaaaggcagaagaaaacagaaaattgcaaaagatgaaggatgaacaacatcaaaagagtgaattactggaactgaaacggcagcagcaagagcaagaaagagccaaaatccaccagactgaacacaggagggtaaataatgcttttctggaccgactccaaggcaaaagtcaaccaggtggcctcgagcaatctggaggctgttggaatatgaatagcggtaacagctggggtatatgagaaaatattgactcctatctggccttcatcaactgacctcgaaaagcctcatgagatgctttttcttaatgtgattttgttcagcctcactgtttttaccttaatttcaactgcccacacacttgaccgtgcagtcaggagtgactggcttctccttgtcctcatttatgcatgtttggaggagctgattcctgaactcatatttaaactctactgccagggaaatgctacattatttttctaattggaagtataattagagtgatgttggtagggtagaaaaagagggagtcacttgatgctttcaggttaatcagagctatgggtgctacaggcttgtctttctaagtgacatattcttatctaattctcagatcaggttttgaaagctttgggggtctttttagattttaatccctactttctttatggtacaaatatgtacaaaagaaaaaggtcttatattcttttacacaaatttataaataaattttgaactccttctgtataaatgggtcatttttatttttaatgaaaagttattggggttttctctcttgaagggtctcattttaattcccttttccaggccgtatagatcaaatatagtactgtcattactgttggctcttgttttggtcttgacttactaatagtgttaccctgattttcagagggggacagtttatctccagaaaggccaatgtttgtatacacatcagctagacacaaatatagacatcatatgtagtttgtacatgtttcagaaacttgttttttctttgctctgtgtaacctatttcctattgctagttcagttggctttcttattcacttctgtgaccctgaaccagttctcagaccctagagtgtaagagcattgattttctacgctgtgtaatctagctcaatccctctgtcccctccgcctcaccgtcccccagccaccacattgtatagcaaaagcattacattcaatcctagaataaaggtaaatacaacaaatcatctttgcagctggacaactaataatactttgcagcattaagagatcttctgtgttaccagtcactctgttgaaatgaactttccgaatctctttattcaggaaaacatggggttttgaaattcttgggccaagagacataactgaggggttcgcagagctaggcaagggtgcactaggaaagggccacattggtgggtggggggtaacagagaacagatggtgtcaggaagtttctctggagtaaataatgtggatattcttggtttccctctcctccgccagctgaagctgtgttagtgctgttgacactaatataaaatgtttggtccatttgaaatccttgtcattgccttatatgggggaaactcaatcccccagcctgtgttggaaatatcaccaaactgattgtaaatgtgcggctgtagcagacattttagtgtggtggtgtgcagccatttcggccctacacctgccagcctggctaccttacagttgtgttccgatttttgcgtctatgcttggtgtgcctcacttgctgcattttccagcatgcaaccaggagttgacgtaggaaaaagggatgctttcttactttggaagctctcagggaagttggtgtcaatttctcctccactgcctggcctaccctgcactcccaaagattttgtgcagatgggtagttccattttttaaaaattgtgcagatatggaaaattgtgacttacttcatgaccagaactatctagaatatgtgtgggggtataaacatcttgcttaaccaaatatctatgtaggcagaggtaaccaggagagaagcaagacttgctgcctaaaggagcccaccattttacttttcacatttaatctgccacgttgaatcaattggaataaaacctgactcgcaggtgactggacaggaaatcccaaagttccaccatttctatgcttaattttaacgtccccccgctttttttttgtagaaaataaaaacaagaaaatcgttccaatgtaagatgtttgttatagaaactttaggcaatacaggtgtgtaataaaatgtttaataaacttctaaacacttttgtatttggatttaaaaaaaaaaaaaaaaaaaa

SEQ ID NO: 6438 - protein, 191 aa, Homo sapien [sequence omitted]

SEQ ID NO: 6439 - DNA, 1267 bp, Homo sapien
gcttcttggagctgaatggtgtagcattactatatggcttttctctctagtcttcattgtgtcatctgtagtgagctatagagttttttttgtttcgggaatttttacaacttgtttgcatgggttcacctagtagcattggttcttgcttatagtctttaatacacaatcagcaaagcttacaatccactcaagagacttactattttgtcactgttgaaaatgggctaaatgatgtaaattgaatgtggctgtcaactaaaacaaaattcagtatagaattagtattcatccagtcatggacatacctgtagcatagttttctcttgagacataataggccgtttcctactgtaaaaacttacagccagcttcatacaataaagtaaattttttcctgtgttttggcaggctcccgtcatacatgtgtattggtggtgctgttaccaaaatgatcattgttactatggtggcatacagcttcatggagcagaaagtttctacttggtatttaattaataaaatgttgaggaatggctgaaacagttaataatgaagtatttttacattgctggtattgtgttttcagcatattggtagtttataatacagacttcttgttgtcaaagatcttcccgcttaaaaattatattccttttctcacgtgtttattagagaagaacaaatgataaaaattagcattttaatgatatatttatgtgtagaaatagggggagaaaaaaaggccaactgaggtaatctaggtgaaaaagtttgttttcagtttagctacatggtttaaccagaattagaagaagaacttcatttccaaccaaagaacaggccgcacagccaccattttggggtcttgagcagagagagaaaacaaataggtggtttgtgagaactctgaattatgtagaaaaccagcttttctacataataaataagctttgccttatttattaaagttaggatttctttgcagttcttaaatgtacatttaaattatatcaagttgactttagaagaaaaaaattataagcagcctacctctatcatgtatctttgttgttaaccagagtttttaaaatgaaaaaaatttctgtaatttatttttggttctatgagattataattaaaccccaaattatatatttaaaaaacaaaaaccaaaagatttttagtcattattatagtaactgaaattaagtagagttacttttttttaaaattatttttaaaaataattactactttggaaagt

SEQ ID NO: 6440 - DNA, 1539 bp, Homo sapien
ggacgcggtttccgcggcaacgcggctggaccctggcctgcgctggctggggaggaagcggttctaggggagcgtgcgggcgccggggtccggcggcgagaggccaccttctggccttgcgatgaatcctcggtttccccttctcagatggggttttcgtgagggtacaacgtcggcattagacattccaggtgacgcccgtacgcggtgggcggttcgggccggagctctggaacgctggccctggaggcgtcgacccctcgttactgatgcagggacgcggtgcggaccagtcaggcccagagctcgtccttagatgtgggttcgaatctctgccccgccaacttgtgatcgtatcgactcggcccagacgcaattttcttctctgcaaaatcgtcataagaataatcacttgtcagggtagctgcgggcatcccattcgttcctttcatcagcgccgggcatatggggcgtcagaggctgagaacgttgccgtgaagaggcttaaaagcaagacccggagtggcgaccttaaagaggacggactgaagaaacgcgggaatgagctccagacgcgggagtttcctctctacaaagttacactgcagcagcttgtctaccctgccccttgtcttttgagaagttcaaaccttcagaaaagttgcaagaacacgaggctaaaggcagcagttcactatactgtgggttgtctttgcgaggaagttgcattggacaaagagatgcagttcagcaaacagaccattgcggccatttcggagctgactttccgacagtgtgaaaattttgccaaagaccttgaaatgtttgcaagacatgcgaaaagaaccacaattaacactgaagatgtgaagctcttagccaggaggagtaattcactgctaaaatacatcacagacaaaagtgaagagattgctcagattaacctagaacgaaaagcacagaagaaaaagaagtcagaggatggaagcaaaaattcaaggcagccagcagaggctggagtggtggaaagtgagaattaaagtccctcgccgcttggaaagtgcagccttctacaggtagagccacctagaaatgcatatggctgcaaaggaaactttgaagggttaaatagagatttaaaaaaataaaataaaaaggctgggctagggtgctttttgtgctgaattctccacattgttaactgccaaagctagttttagagaatgagaaagtcttaagcaaaatactcccaggtctcactccagaacataaaaatggtgtgtgatcgaatggtatatattagaaattacatctgttgtaattaaaattgtgtgagcaattaaacatggttgactttttcaagcaaaaatcagttcatcttttgatgtaattttctaggctaaatggcaatctctgaaagatgaataaagctatatttatttagcttttctggttactaatgttgtttttaaacacatgccgcctttggtcaccaggtaaaagggcatatgtttgggaatggcccttttgacttttttt

SEQ ID NO: 6441 - protein, 256 aa, Homo sapien
MQGRGADQSGPELVLRCGFESLPRQLVIVSTRPRRNFLLCKIVIRIITCQGSCGHPIRSFHQRRAYGASEAENVAVKRLKSKTRSGDLKEDGLKKRGNELQTREFPLYKVTLQQLVYPAPCLLRSSNLQKSCKNTRLKAAVHYTVGCLCEEVALDKEMQFSKQTIAAISELTFRQCENFAKDLEMFARHAKRTTINTEDVKLLARRSNSLLKYITDKSEEIAQINLERKAQKKKKSEDGSKNSRQPAEAGVVESEN

SEQ ID NO: 6442 - DNA, 3983 bp, Homo sapien; identical to SEQ ID NO: 4429

SEQ ID NO: 6443 - protein, 814 aa, Homo sapien; identical to SEQ ID NO: 4430

SEQ ID NO: 6444 - DNA, 3145 bp, Homo sapien
  Unsure 1518-1809, 1877-1894: Unknown base
gggaaagcagcaggttggggcttcttgtggccaacttcagagcctgtcaccaggaaaggtaagcatgggaggaaggaagatggcgacagatgaagaaaatgtctatggtttagaagagcgccactgggaacagcatcctgggccagagacggttcttctccaggctgggggccacgtctgtgaccaggcctgcaccacgggcagccgcaggtgggacaagtgccacgtggaagtcgtggacactccggacattttcagctcccaagtgtccaagacagatcctggctgtgaggagagaggtcactgctacctgctctcggcccccggaccccacgcgctgctcctggtgacccagttgggtcggttcaccgcccaggaccagcaggcggtgaggcaggtgagggacatgttcggggaggacgtcctaaaatggatggtcatcgtcttcaccaggaaggaggacctggccgggggctccctgcacgattacgtgagcaacacagagaaccgggccttgcgcgagctggtggccgagtgcgggggccgggtctgtgcctttgataaccgggccaccggccgggagcaggaagcccaggtggagcagctgctggggatggtcgagggcttggtgctggagcacaagggcgcccattactccaacgaggtgtatgagctggcgcaggtgctgcgctgggcaggccctgaggagcggctccggcgggtggcggacgcgtggcagccagggtgcagaggaggccatggggcgcctggctgtcggcccggctgtggaagtggctgaagtcccccaggagctggaggctgggcctggccctgctgctggggggcgcgctcctgttctgggtgctgctccacaggcggtggtcggaggccgttgcggaggtcgggcctgactgacagcgcaggtcctaaaactgaaggcaacttggttaagggaggctgaattcttggagctgaagggaaaacttcattccaacggaaggaatcctgtagtttcaggcatagttttaatgacacagaaaactttgctgcatcacctttgcaactttgccaaagctcagagttcactttttaagtttttaactcattttaaatgatgtgtatgcagagttttaaaataaattcgtctaacaataacttccttggtagttttggtagtctaatgtcaagtagcttgtagtggggacaaacgcatggcacagggaaaacaagtgccattattttcgagctttttaaaaaatttagactgcccctccttgataattttctagttcttatacatgggtagataggttcctttgtgatccttgtagacttttagcatcaaaaaaagaaatgtgggggttacacacgtgaatgttacttctgagacatcagtttatagtacaatgatttactaccaaaaagatgaatgtaactgtactggtacaaagtgggaaataaccgtttccacttttctagaacatattatggttcatggcattcccaaatgaagtaagnnnnnnnnnnnnnnnnnnnnnnnnnnnnnnnnnnnnnnnnnnnnnnnnnnnnnnnnnnnnnnnnnnnnnnnnnnnnnnnnnnnnnnnnnnnnnnnnnnnnnnnnnnnnnnnnnnnnnnnnnnnnnnnnnnnnnnnnnnnnnnnnnnnnnnnnnnnnnnnnnnnnnnnnnnnnnnnnnnnnnnnnnnnnnnnnnnnnnnnnnnnnnnnnnnnnnnnnnnnnnnnnnnnnnnnnnnnnnnnnnnnnnnnnnnnnnnnnnnnnnnnnnnnnnnnnnnnnnnnnnnnnnnnnnnnnaagaaaaagagtaggatattgggaaaataacatataatatcttctatatggttattcatatttttatnnnnnnnnnnnnnnnnnngtctgtatctcgagctcctctctggttatggagaagaggcagagcaccaggtgcataggctgagactgcagacacctgagcatcctatgctgtgaggcgaaagcatccggttttttcgggatgggcctgtccaggaaggttctcgaatgccacgtgattagaaaatttgccgctgactggttgtgcgaatcaaacaataggatttccttatttctatttctgagcataatgagaaccctttaagggaactcattgtctttaaatcagccagcctctagtgaggtcatggagacatgggaagcaggtattcacattagctctattcaagaggaagaggaggagggagtgtgcgcaggcgccctagggtcttccccagcacacgttgggaagaaggggtctgcaagcatgcgcacaattgccagctcaggctaaggactgcaggaggttccaggtgggttgcgggcttcgggcaggctatggtgaggggtcctgagggccttggtgaccgctgcagggagttggactttttgaagcgtggctcaagaaaaacccatgtttaattcctgcctttcgcttcctcagcagcctttctgggcccaggcaggggcctcgagccaggaaggatcctttgatgaccagaggggacagcagggagggcacagcgtggtcgtccacggtcacttgcgcacgagccagtgctgctgctggtgttagacaacaacttttatcaaagtggtttaatgtacagcagcaacaaagctgctttgtggagcagggctcccaataggcagtgtgcccagagtagcagctcggaagcagtactgcaatcacatttatacccactttcaactatatgcaaatttaggggtggattatgccaaaatttctagaaaaaaggtcgtaacttccaggtcgtgggattgttgctatggaaaggagccaaaacttccagctgttgccttagcaatggtaacctgacgtggcactggtgagtgtgttttatggagagactctttcacctcttccctttcagcttgtcttcagtgtggtctggagcccaatccccacctccagagtctagtcctgcctcctacctcagtaataaaaagtagtagtatatggttaattgtcaaatacatttgcaaagtgtaatcaaagatacattaccaatctgaatctcaaaatgtgctatcatctttgaatttgaataatgtattattaaagaagttacagttttcctttacattcaat

SEQ ID NO: 6445 - protein, 265 aa, Homo sapien
  Unsure 1518-1809, 1877-1894: Unknown amino acid
GKQQVGASCGQLQSLSPGKVSMGGRKMATDEENVYGLEERHWEQHPGPETVLLQAGGHVCDQACTTGSRRWDKCHVEVVDTPDIFSSQVSKTDPGCEERGHCYLLSAPGPHALLLVTQLGRFTAQDQQAVRQVRDMFGEDVLKWMVIVFTRKEDLAGGSLHDYVSNTENRALRELVAECGGRVCAFDNRATGREQEAQVEQLLGMVEGLVLEHKGAHYSNEVYELAQVLRWAGPEERLRRVADAWQPGCRGGHGAPGCRPGCGSG

SEQ ID NO: 6446 - DNA, 658 bp, Homo sapien
agattaaggaaggaaagatatgagaagcctgcagagcatgctttcccagactgtatgggcctgggaaaggagaagtggacagaaagggagcactaggtacccctggaagagaagattcatccaagtcatcagggaagttactaatgcaagggaaaaaatttagagacagggccaaacacgcttcttccaagtcctttctgtctgctcagtcacctctatgcttatttttcttctttcctctaagtagtgtcatgcgttttcttcctattcctagtcgctcctagtcaactaactcctctctttaccatcttttcatcagaacttgaaacctcctctccttcatgtattagtgatcatgtttctccataatactgctagaaacaagaattgaaacctggaaaacctgcatttgagaaccagatctccctctgctagctatttgagaagttattttgttccattctttttgttgaggtcctgtctcaaaagaaaacaaaaaagataagaaaaagaaaactagggaatctggacagaataagtttatatatataataaagaactgagatagaactgggttgactgaataattatttgagttgcttttgagtgaatttttcctattggagtctacctttgtttttttgtgtgtgcgcagcgg

SEQ ID NO: 6447 - protein, 31 aa, Homo sapien
RLRKERYEKPAEHAFPDCMGLGKEKWTEREH

SEQ ID NO: 6448 - DNA, 659 bp, Homo sapien
acattctgctgttttattatgtcagtttcctaagtctgtgtttgaatatgatttttcaccatgctatctatgtgtttttgtgtttgctgtgtatgagaagacatggtctaattattaggggccaggcactgtgaacctatgcagaaaaccacaaaagtccaaatctgcactatccaatatggtaactacaagtctcttgtagattttgagctcttgctgtgaagctctgaattgagatgtactacaagacttcaaagagctagtacaaaaaaagtaaaatatctcatgaaaaattgtataatatttttgactactagaaatatttagctgctagaaatttttaaatttcatatatgtgccttgcatttgtagtatacataatatttatattgaatggcaggacaagtggccactgtgagcccaaagtacacatggaatatttttgaaaagaagccaggagttctagagctatagaatttcctatctggaagagatttccaaaagtaaatagtgtaaaagtgcttatatttgtccaacatagccctcactttccaccacacacacgttaacacatgtaaatgtccatgcatgcaacactgtgaccagcataagcgaagagttgctatacattaagagtttggcatcactggaagaatctc

SEQ ID NO: 6449 - protein, 43 aa, Homo sapien
ILLFYYVSFLSLCLNMIFHHAIYVFLCLLCMRRHGLIIRGQAL

SEQ ID NO: 6450 - DNA, 1797 bp, Homo sapien
gggggccgggtggaggggcaaggcgagtgtgtgtccttatcctagcaattggggcgcgggcctgtgagccagttggagttgcggcggcgggaacgattgggctgagcagaggacgacatgttgcttttcgtggagcaggtagcatctaaaggaactggtttaaatcctaatgccaaagtatggcaagaaattgctcctggaaatactgatgccaccccagtaactcatggaactgaaagctcttggcatgaaatagcagctacatcaggtgctcatcctgagggtaatgcagagctctcagaagatatatgtaaagaatatgaagtaatgtattcttcatcttgtgaaaccacaagaaatactacaggcattgaagaatcaactgatgggatgattttaggaccagaagatctgagttaccaaatatatgatgtttccggagaaagcaattcagcagtttctacagaagacctaaaagaatgtctgaagaaacaattagaattctgtttttcacgagaaaatttgtcaaaggatctttacttgatatctcaaatggatagtgatcagttcatcccaatttggacagttgccaacatggaagaaataaaaaagttgactacagaccctgatctaattcttgaagtgttaagatcttctcccatggtacaagttgatgagaagggtgagaaagtgagaccaagtcataagcgttgtattgtaattcttagagagattcctgaaacaacaccaatagaggaagtgaaaggtttgttcaaaagtgaaaactgccccaaagtgataagctgtgagtttgcacacaatagcaactggtatatcactttccagtcagacacagatgcacaacaggcttttaaatacttaagagaagaagttaaaacatttcagggcaagccaattatggcaaggataaaagccatcaatacattttttgctaagaatggttatcgattaatggattctagtatctatagtcaccccattcaaactcaagcacagtatgcctccccagtctttatgcagcctgtatataatcctcaccaacagtactcggtctatagtattgtgcctcagtcttggtctccaaatcctacaccttactttgaaacaccactggctccctttcccaatggtagttttgtgaatggctttaattcgccaggatcttataaaacaaatgctgctgctatgaatatgggtcgaccattccaaaaaaatcgtgtgaagcctcagtttaggtcatctggtggttcagaacactcaacagagggctctgtatccttgggggatggacagttgaacagatatagttcaagaaactttccagctgaacggcataaccccacagtaactgggcatcaggagcaaacttaccttcagaaggagacttccactttgcaggtggaacagaatggggactatggtaggggcaggtaagaaaataaagtacctgaaaacctttgataataatgtgatcatcctgaataattgaagaacgtgatcttcataataattaaatgagcatttaattattggtatatggttatattaaataaatacgttattttcagaacatgagttggttgctttttataattattaagaaatagagtgcccatacagaatatagctctgaatcagaggtttataaagttattctgaagttccttatagctcatataagaaagaatagcttagaaaattaacatatccatttgccttatggttttaatttcttccagcttttaaactatagaagtggctgggtgcggtggctca

SEQ ID NO: 6451 - protein, 445 aa, Homo sapien
MLLFVEQVASKGTGLNPNAKVWQEIAPGNTDATPVTHGTESSWHEIAATSGAHPEGNAELSEDICKEYEVMYSSSCETTRNTTGIEESTDGMILGPEDLSYQIYDVSGESNSAVSTEDLKECLKKQLEFCFSRENLSKDLYLISQMDSDQFIPIWTVANMEEIKKLTTDPDLILEVLRSSPMVQVDEKGEKVRPSHKRCIVILREIPETTPIEEVKGLFKSENCPKVISCEFAHNSNWYITFQSDTDAQQAFKYLREEVKTFQGKPIMARIKAINTFFAKNGYRLMDSSIYSHPIQTQAQYASPVFMQPVYNPHQQYSVYSIVPQSWSPNPTPYFETPLAPFPNGSFVNGFNSPGSYKTNAAAMNMGRPFQKNRVKPQFRSSGGSEHSTEGSVSLGDGQLNRYSSRNFPAERHNPTVTGHQEQTYLQKETSTLQVEQNGDYGRGR

SEQ ID NO: 6452 - DNA, 2396 bp, Homo sapien
  Unsure 1223-1238: Unknown base
tttgtggtttattgatgcatcaaagattccttagagataaatgcatataaaatgtgaccagaaaacattggatttatggagattatgcacttggtgcccacatttctcaaggatgggaatgttgtgggagtgagagggatgttgcttcctttataatcgtatacacagttaatttcttatttcctactttgggcttctgcctgctgcacctgctgctattggcctattcatggtagctccagccttccccttgacctcgatgtccctgccatcaggaccttcacatgccatcttgtgttcccccaggagtccctgtgtctaatgtgaatctagagatccggcccaccggagggcagctgattgaaggagaaaatatggtccttatttgctcagtagcccagggttcagggactgtcacattctcctggcacaaagaaggaagagtaagaagcctgggtagaaagacccagcgttccctgttggcagagctgcatgttctcaccgtgaaggagagtgatgcagggagatactactgtgcagctgataacgttcacagccccatcctcagcacgtggattcgagtcaccgtgagaattccggtatctcaccctgtcctcaccttcagggctcccagggcccacactgtggtgggggacctgctggagcttcactgtgagtccctgagaggctctcccccgatcctgtaccgattttatcatgaggatgtcaccctggggaacagctcagccccctctggaggaggagcctccttcaacctctctctgactgcagaacattctggaaactactcctgtgatgcagacaatggcctgggggcccagcacagtcatggagtgagtctcagggtcacagttccggtgtctcgccccgtcctcaccctcagggctcccggggcccaggctgtggtgggggacctgctggagcttcactgtgagtccctgagaggctccttcccgatcctgtactggttttatcacgaggatgacaccttggggaacatctcggcccactctggaggaggggcatccttcaacctctctctgactacagaacattctggaaactactcatgtgaggctgacaatggcctgggggcccagcacagtaaagtggtgacactcaatgttacaggaacttccaggaacagaacaggccttaccgctgcgggaatcacggggctggtgctcagcatcctcgtcctnnnnnnnnnnnnnnnnctgctgcattacgccagggcccgaaggaaaccaggaggactttctgccactggaacatctagtcacagtcctagtgagtgtcaggagccttcctcgtccaggccttccaggatagaccctcaagagcccactcactctaaaccactagccccaatggagctggagccaatgtacagcaatgtaaatcctggagatagcaacccgatttattcccagatctggagcatccagcatacaaaagaaaactcagctaattgtccaatgatgcatcaagagcatgaggaacttacagtcctctattcagaactgaagaagacacacccagacgactctgcaggggaggctagcagcagaggcagggcccatgaagaagatgatgaagaaaactatgagaatgtaccacgtgtattactggcctcagaccactagccccttacccagagtggcccacaggaaacagcctgcaccatttttttttctgttctctccaaccacacatcatccatctctccagactctgcctcctacgaggctgggctgcagggtatgtgaggctgagcaaaaggtctgcaaatctcccctgtgcctgatctgtgtgttccccaggaagagagcaggcagcctctgagcaagcactgtgttattttcacagtggagacacgtggcaaggcaggagggccctcagctcctagggctgtcgaatagaggaggagagagaaatggtctagccagggttacaagggcacaatcatgaccatttgatccaagtgtgatcgaaagctgttaatgtgctctctgtataaacaatttgctccaaatattttgtttcccttttttgtgtggctggtagtggcattgctgatgttttggtgtatatgctgtatccttgctaccatattgggaacagccaaaagaagttatagaacaagaatttaaggtgactctatctgaagtgtatttttgtacttacagggtgacattcccaaccaaattaccctagttatgatgaaaaataacttcagcatttcattaaagactctgctagtttaatatgtgacttgtatccccactgcaaagaccttatgtgtgaagaatcacattaattgtaatttttgcttcatgacatagtctcatcattttccatacatgatagatttc

SEQ ID NO: 6453 - protein, 460 aa, Homo sapien
  unsure 314-318: unknown amino acid
  Unsure 1223-1238: Unknown amino acid
MPSCVPPGVPVSNVNLEIRPTGGQLIEGENMVLICSVAQGSGTVTFSWHKEGRVRSLGRKTQRSLLAELHVLTVKESDAGRYYCAADNVHSPILSTWIRVTVRIPVSHPVLTFRAPRAHTVVGDLLELHCESLRGSPPILYRFYHEDVTLGNSSAPSGGGASFNLSLTAEHSGNYSCDADNGLGAQHSHGVSLRVTVPVSRPVLTLRAPGAQAVVGDLLELHCESLRGSFPILYWFYHEDDTLGNISAHSGGGASFNLSLTTEHSGNYSCEADNGLGAQHSKVVTLNVTGTSRNRTGLTAAGITGLVLSILVLXXXXXLLHYARARRKPGGLSATGTSSHSPSECQEPSSSRPSRIDPQEPTHSKPLAPMELEPMYSNVNPGDSNPIYSQIWSIQHTKENSANCPMMHQEHEELTVLYSELKKTHPDDSAGEASSRGRAHEEDDEENYENVPRVLLASDH

SEQ ID NO: 6454 - DNA, 2318 bp, Homo sapien; identical to SEQ ID NO: 4064

SEQ ID NO: 6455 - protein, 182 aa, Homo sapien; identical to SEQ ID NO: 4065

SEQ ID NO: 6456 - DNA, 1291 bp, Homo sapien
aaaaaaacaaaaaacaaaacaaaaaaaaaaccttccaaaagaagtttgagataattttatgtttagaaaaattagaaattggattgagtaaaatttacatattttacacaagaggactaacatctttataatatttaacctttcagtaaatttatgttttatgtttctcagcctatcttttctagtataggtgatttttttagtgtggttactattgtaaatgagatcctactactttaaaaaatgaaaattaaatctatcgcttttatgactttaaaacattagacttatgtaagtgtaaacattatttaaaaacataatgtagaaaattaaagtcccccataattaaaatccctttcccccagaaaaagtcaacagcatattcatcagttttttcctaaagtatgttttagcactttgaccatatgagacaacccttctgctgttagcatttttctctttgcaatagatcttcctatgtcagtacacatcaatctacctcattcttacctctgcataagagagtagtgtgtagttgtataatagtttaacttggcgattggttattgattttgtaactagccagttactgaattattctaaaggttttgctgttgttaatttctttcgcctttttcagttgggtaatagttctgggtaggttgataattttattcccatatttgtaatcttatttcactttctcaactcatcacattgactggtacttttagaacaatgttaaaaaacatttacataattgtgctgatattgtacattatttgatatatatatattttttttacttagaagagtgtttctccaaaactataaatttgactcttagtgtaaaataatcttaatatttgaattatacattcaggttatgccctctatttctagtttgatgaaaatattattagtaatggatgttggggttttattaaatggcttttttccacatctgtcaagatgatcaactggcttttctctattatgactttagatgaatcgttttaatagatttgctaatgttaagacatctctgcatttctacaagaatctgatgtagtcatagtatactattcttttaatatacatctcctttcaatgttaacagtggttatttatgattggttggtccatagtagatttttattttgtgtttcttatctgtactttctgatttttctacaaagattgtgtattacttgtataataaaaataagagctttaaattgtgaaattcttctggatttggttttctcattttattatggaatttttcata

SEQ ID NO: 6457 - DNA, 1797 bp, Homo sapien
gccaagctgcgcgggcagaagcggtccggggcctccgcggccccgcggcctccgcggccgctgccttggcacccagcgccacccgcacacggcgctccgctacgccagtgcctgggatgcaacgagccatgtgctggtgtgagaagccgcctgtcggagaagcctgcgtgctgagtgctgctcgtctgcctgcggtgcccacgtgaggatgtggccctggtggtgacgcctgccgccgcctgatgcttggctgttgctcccgccacccgcctgcctgccgccgccgactcccgcgaccccgacgtcctcggcgtccaacctggacctgggcgagcagcgggagcgctgggagacgttccagaagcggcagaagcttacctccgagggtgccgccaagctcctgctagacacctttgaataccagggcctggtgaagcacacaggaggctgccactgtggagcagttcgttttgaagtttgggcctcagcagacttgcatatatttgactgcaagtaccggaattatatatgaataataagcacatacgatggaattactcaaatggagaactgaccaggctactaacaatagagtccagattggaaaagaagcactgtggaataacttgtgagaggattctgtgctaaattagaactttttcaaaggtggcctgaaaagaggggacttcagtttaattccagagatggtaattctggggacgtgttttacttggagctggacttcttgtgacgtggtgatgaagaaagagggaaacctaaacttccttgtccatttttggtgtggatgtctcagagacatcaggttgtagcagtgtctgaaatttgtttcctaagtgtctctgaagtccagcgcttctcttcactgtaaagaactgaggggtgggcagtacagacctgtctgttggtcctgtgttctgagcattgcagaacctcgactgctgacttgggacccccctgggctctgctgtacctgcaaaccagaggcactgctatccaggcctttgccccagctcctcggccctggatggtgctgaaaggggcatcatctgtggggtcggctggctctcatggctgggccgctcaggcatagaggatgcaggtggctgctcacaatctggaatttgctctgtctttctgtagttgcagcatttgcaagaagaagcagaatagacacttcattgttccagcttctcgcttcaagctcctgaagggagctgagcacataacgacttacacgttcaatactcacaaagcccagcataccttctgtaagagatgtggcgttcagagcttctatactccacgatcaaaccccggaggcttcggaattgccccccactgcctggatgagggcactgtgcggagtatggtcactgaggaattcaatggcagcgattgggagaaggccatgaaagagcacaagaccatcaagaacatgtctaaagagtgagcttctgcctctcctgccctgaaaaggaggaatgattggggccagcaactttgctctccctgccgtgcctcggtggtgctcctgaatgtggctgacctgggctgctggttccgttgactagggtcatcttgatctctgcagtttgctccagctaccagtttctttaggcagctctttgtcctccctctgcccagattttgatgtagtctaattgacatccttctcttcccaacttttgtgtgatcttttaggaaaaaaaataaatatttttaacattaaagcaaaaaaaatctatgtcgggtgcggagaaagaggtaatggaaatg

SEQ ID NO: 6458 - protein, 67 aa, Homo sapien
QAARAEAVRGLRGPAASAAAALAPSATRTRRSATPVPGMQRAMCWCEKPPVGEACVLSAARLPAVPT

SEQ ID NO: 6459 - DNA, 602 bp, Homo sapien
gacgcggggccggaacgcgaagagggtggtggagtcgggctacccactgattttccttcccttacttcccctgagcccttgggcccacttcccagcctaccgcttccgtccccgcccgactcttgggccagcgcctgggcccacactttcctatcccccgcagatgccggtggccgtgggtccctacggacagtcccagccaagctgcttcgaccgtgtcaaaatgggcttcgtgatgggttgcgccgtgggcatggcggccggggcgctcttcggcaccttttcctgtctcaggatcggaatgcggggtcgagagctgatgggcggcattgggaaaaccatgatgcagagtggcggcacctttggcacattcatggccattgggatgggcatccgatgctaaccatggttgccaactacatctgtcccttcccatcaatcccagcccatgtactaataaaagaaagtctttgagtaaaaaaaaaaaaaaaaaaaaaaaaaaaaaaaaaaaaaaaaaaaaaaaaaaaaaaaaaaaaaaaaaaaaaaaaaaaaaaaaaaaaaaaaaaaaaaaaaaaaaaaaaaaaaaaaaaaaaaaaaaaaaa

SEQ ID NO: 6460 - protein, 79 aa, Homo sapien
MPVAVGPYGQSQPSCFDRVKMGFVMGCAVGMAAGALFGTFSCLRIGMRGRELMGGIGKTMMQSGGTFGTFMAIGMGIRC

SEQ ID NO: 6461 - DNA, 350 bp, Homo sapien
atggtataagattaaatatattagttatgaaaataattgtaaatggcttattgaacttatagtcagtaaaaatcatgtttttgaaaattatgtaatgactttggaaaataccagcaatataatgttaagtggggaaaaaagcaagttactcctctgtaatacatatgattttagttttgtaataaaaattcccaaccatatatgcacttatagggaaacaaaggacccatcgcaaatgttttccatgctgatctccaaagtggtgagtttatgtgtgatttttattttgtttatgctcttctgtattttccgaatttcatacaataaatatctgttacttttacaatatg

SEQ ID NO: 6462 - protein, 115 aa, Homo sapien
WYKIKYISYENNCKWLIELIVSKNHVFENYVMTLENTSNIMLSGEKSKLLLCNTYDFSFVIKIPNHICTYRETKDPSQMFSMLISKVVSLCVIFILFMLFCIFRISYNKYLLLLQ

SEQ ID NO: 6463 - DNA, 313 bp, Homo sapien
ctcagactgacactgttacaaactagcatcttcagatgcatggtatttactttaaatgtgcttatatacagtgtagagaagctcttgtataagaagacatctatgctagctaacttagtagtagtagagggaacatattcagtgagctgcctttatatctgtagtgtcggagacttgttactggttcatttgtggttatcagttgaaggttctgttcctgagatgtgcaatagtagtgttgaaaggtattgtttaatagtgatggggaacagacatattggacttttttttccatattaaattatttagtttg

SEQ ID NO: 6464 - protein, 99 aa, Homo sapien
LRLTLLQTSIFRCMVFTLNVLIYSVEKLLYKKTSMLANLVVVEGTYSVSCLYICSVGDLLLVHLWLSVEGSVPEMCNSSVERYCLIVMGNRHIGLFFPY
